(19) United States
(12) Patent Application Publication
(10) Pub. No.: US 2007/0224205 A1
(43) Pub. Date: Sep. 27, 2007

(54) Compositions that include hemagglutinin, methods of making and methods of use thereof

(76) Inventors: Thomas J. Powell, Madison, CT (US); Albert E. Price, New Haven, CT (US); Valerian Nakaar, Hamden, CT (US); Robert K. Evans, Souderton, PA (US)

Correspondence Address: HAMILTON, BROOK, SMITH & REYNOLDS, P.C., 530 VIRGINIA ROAD, P.O. BOX 9133, CONCORD, MA, 01742-9133, US

(21) Appl. No.: 11/714,684

(22) Filed: Mar. 6, 2007

Related U.S. Application Data
(60) Provisional application No. 60/779,854, filed on Mar. 7, 2006.
(60) Provisional application No. 60/784,497, filed on Mar. 20, 2006.
(60) Provisional application No. 60/790,457, filed on Apr. 7, 2006.
(60) Provisional application No. 60/814,292, filed on Jun. 16, 2006.
(60) Provisional application No. 60/830,881, filed on Jul. 14, 2006.
(60) Provisional application No. 60/838,007, filed on Aug. 16, 2006.
(60) Provisional application No. 60/856,451, filed on Nov. 3, 2006.

(51) Int. Cl. A61K 39/295

(52) U.S. Cl. 424/159.1; 424/209.1; 424/201.1; 424/272.1; 424/242.1

(57) ABSTRACT

Compositions comprise a flagellin component or a Toll-like Receptor agonist component that is at least a portion of a flagellin or a Toll-like Receptor agonist, wherein the flagellin component or Toll-like Receptor agonist component includes at least one cysteine residue and whereby the flagellin component or Toll-like Receptor agonist component activates a Toll-like Receptor 5 or Toll-like Receptor. Compositions comprise a flagellin component that is at least a portion of a flagellin, wherein at least one lysine of the flagellin component has been substituted with at least one arginine, serine and histidine, whereby the flagellin component activates Toll-like Receptor 5. Compositions can further include an antigen, such as an influenza antigen, a flavivirus antigen, a pathogen-related antigen, a bacterial capsular antigen and a carrier protein. The compositions are used to stimulate an immune response and a protective immune response in a subject.

### RELATED APPLICATIONS

[0001] This application claims the benefit of U.S. Provisional Application Nos. 60/779,854, filed on Mar. 7, 2006; 60/784,497, filed on Mar. 20, 2006; 60/790,457, filed on Apr. 7, 2006; 60/814,292, filed on Jun. 16, 2006; 60/830,881, filed on Jul. 14, 2006; 60/838,007, filed on Aug. 16, 2006; and 60/856,451, filed on Nov. 3, 2006. The entire teachings of the above applications are incorporated herein by reference.

### BACKGROUND OF THE INVENTION

[0002] Viral influenza infection can lead to disease. Strategies to prevent and manage disease associated with viral influenza infection can include vaccines with inactivated viruses and drugs. However, such strategies can be costly to maintain supply with demand and, thus, be limited in supply; may result in variable protection and less than satisfactory alleviation of symptoms, thereby ineffectively preventing or treating illness and, in some instances death, consequent to disease associated with viral influenza infection. Thus, there is a need to develop new, improved and effective methods of treatment for preventing and managing disease associated with viral influenza infection.

### SUMMARY OF THE INVENTION

[0003] The present invention relates to compositions, such as compositions that stimulate a protective immune response, and methods of making proteins that stimulate a protective immune response in a subject.

[0004] In one embodiment, the invention is a method of making a protein that stimulates a protective immune response in a subject, comprising the steps of separating a portion of a protein from a naturally occurring viral hemagglutinin to thereby form a protein portion, wherein the protein portion includes at least a portion of a globular head, and at least a portion of at least one secondary structure that causes the globular head to essentially retain its tertiary structure, and wherein the protein portion lacks a membrane fusion domain, a transmembrane domain and a cytoplasmic domain; transforming a nucleic acid sequence encoding the protein portion into a prokaryotic host cell; and culturing the prokaryotic host cell to thereby make the protein that stimulates a protective immune response in a subject.

[0005] In another embodiment, the invention is a method of making a protein that stimulates a protective immune response in a subject, comprising the steps of separating a portion of a protein from a naturally occurring viral hemagglutinin to thereby form a protein portion, wherein the protein portion includes at least a portion of a globular head, and at least a portion of at least one secondary structure that causes the globular head to essentially retain its tertiary structure, and wherein the protein portion lacks a membrane fusion domain, a transmembrane domain and a cytoplasmic domain; transfecting a nucleic acid sequence encoding the protein portion into a eukaryotic host cell, wherein the eukaryotic host cell is not a Pichia pastoris eukaryotic host cell; and culturing the eukaryotic host cell to thereby make the protein that stimulates a protective immune response in a subject.

[0006] In another embodiment, the invention is a method of making a protein that stimulates a protective immune response in a subject, comprising the steps of separating a portion of a protein from a naturally occurring viral hemagglutinin to thereby form a protein portion, wherein the protein portion includes at least a portion of a globular head, and at least a portion of at least one secondary structure that causes the globular head to essentially retain its tertiary structure, and wherein the protein portion lacks a membrane fusion domain, a transmembrane domain and a cytoplasmic domain; transfecting a nucleic acid sequence encoding the protein portion into a eukaryotic host cell, wherein the eukaryotic host cell is not a Drosophila melanogaster eukaryotic host cell; and culturing the eukaryotic host cell to thereby make the protein that stimulates a protective immune response in a subject.

[0007] In a further embodiment, the invention is a method of making a protein that stimulates a protective immune response in a subject, comprising the steps of separating a portion of a protein from a naturally occurring viral hemagglutinin to thereby form a protein portion, wherein the protein portion includes at least a portion of a globular head, and at least a portion of at least one secondary structure that causes the globular head to essentially retain its tertiary structure, and wherein the protein portion lacks a membrane fusion domain, a transmembrane domain and a cytoplasmic domain; transfecting a nucleic acid sequence encoding the protein portion into a eukaryotic host cell, wherein the eukaryotic host cell is not an insect eukaryotic host cell; and culturing the eukaryotic host cell to thereby make the protein that stimulates a protective immune response in a subject.

[0008] In a further embodiment, the invention is a method of making a protein that stimulates a protective immune response in a subject, comprising the steps of separating a portion of a protein from a naturally occurring viral hemagglutinin to thereby form a protein portion, wherein the protein portion includes at least a portion of a globular head, and at least a portion of at least one secondary structure that causes the globular head to essentially retain its tertiary structure, and wherein the protein portion lacks a membrane fusion domain, a transmembrane domain and a cytoplasmic domain; transfecting a nucleic acid sequence encoding the protein portion into a eukaryotic host cell, wherein the eukaryotic host cell is not a stably transformed insect host cell; and culturing the eukaryotic host cell to thereby make the protein that stimulates a protective immune response in a subject.

[0009] In still another embodiment, the invention is a method of making a protein that stimulates a protective immune response in a subject, comprising the steps of separating a portion of a protein from a naturally occurring viral hemagglutinin to thereby form a protein portion, wherein the protein portion includes at least a portion of a globular head, and at least a portion of at least one secondary structure that causes the globular head to essentially retain its tertiary structure, and wherein the protein portion lacks a membrane fusion domain, a transmembrane domain and a cytoplasmic domain; transfecting a nucleic acid sequence encoding the protein portion into a eukaryotic host cell, wherein the eukaryotic host cell is neither a Picia pastoris eukaryotic host cell nor a stably transfected insect host cell; and culturing the eukaryotic host cell to thereby make the protein that stimulates a protective immune response in a subject.

[0010] In yet another embodiment, the invention is a method of stimulating protective immunity in a subject, comprising the step of administering to the subject a composition that includes a protein made by a method comprising the steps of separating a portion of a protein from a naturally occurring viral hemagglutinin to thereby form a protein portion, wherein the protein portion includes at least a portion of a globular head, and at least a portion of at least one secondary structure that causes the globular head to essentially retain its tertiary structure, and wherein the protein portion lacks a membrane fusion domain, a transmembrane domain and a cytoplasmic domain; transforming a nucleic acid sequence encoding the portion into a prokaryotic host cell; and culturing the prokaryotic host cell to thereby make the protein that stimulates a protective immune response in a subject.

[0011] In an additional embodiment, the invention is a method of stimulating protective immunity in a subject, comprising the step of administering to the subject a composition that includes a protein portion of a naturally occurring viral hemagglutinin, wherein the protein portion includes at least a portion of a globular head, and at least a portion of one secondary structure that causes the globular head to essentially retain its tertiary structure and wherein the protein portion lacks a membrane fusion domain, a transmembrane domain and a cytoplasmic domain.

[0012] In still another embodiment, the invention is a method of making a viral hemagglutinin protein that stimulates a protective immune response in a subject, comprising the steps of separating a portion of a protein from a naturally occurring viral hemagglutinin to thereby form a protein portion, wherein the protein portion includes at least a portion of a globular head and at least a portion of at least one secondary structure that causes the globular head to essentially retain its tertiary structure, and wherein the protein portion lacks a membrane fusion domain, a transmembrane domain and a cytoplasmic domain; transfecting a nucleic acid sequence encoding the portion in a eukaryotic host cell, wherein the eukaryotic host cell is neither a Pichia pastoris eukaryotic host cell nor a stably transfected insect host cell; and culturing the eukaryotic host cell to thereby make the protein that stimulates a protective immune response in a subject.

[0013] In another embodiment, the invention is a method of making a protein that stimulates a protective immune response in a subject, comprising the steps of separating a portion of a protein from a naturally occurring viral hemagglutinin to thereby make a protein portion, wherein the protein portion includes at least a portion of a globular head, and at least a portion of at least one secondary structure that causes the globular head to essentially retain its tertiary structure, and wherein the protein portion lacks a membrane fusion domain, a transmembrane domain and a cytoplasmic domain; infecting a nucleic acid sequence encoding the protein portion into an insect cell host cell; and culturing the insect host cell to thereby make the protein that stimulates a protective immune response in a subject.

[0014] In another embodiment, the invention is a method of making a viral hemagglutinin protein that stimulates a protective immune response in a subject, comprising the steps of transforming a prokaryotic host cell with a nucleic acid sequence encoding at least one viral hemagglutinin that lacks a transmembrane domain and a cytoplasmic domain; and culturing the prokaryotic cell to thereby make the protein.

[0015] In a further embodiment, the invention is a method of stimulating protective immunity in a subject, comprising the step of administering to the subject a composition that includes a protein made by a method comprising the steps of transforming a prokaryotic host cell with a nucleic acid sequence encoding at least one viral hemagglutinin that lacks a transmembrane domain and a cytoplasmic domain; and culturing the prokaryotic host cell to thereby make the protein.

[0016] In another embodiment, the invention is a method of stimulating protective immunity in a subject, comprising the step of administering to the subject a composition that includes a protein having at least one viral hemagglutinin that lacks a transmembrane domain and a cytoplasmic domain, wherein the protein was expressed in a prokaryotic cell.

[0017] In an additional embodiment, the invention is a composition comprising at least a portion of at least one pathogen-associated molecular pattern and a portion of a protein of a naturally occurring viral hemagglutinin, wherein the portion of the naturally occurring viral hemagglutinin includes at least a portion of a globular head and at least a portion of at least one secondary structure that causes the globular head to essentially retain its tertiary structure, and wherein the portion of the naturally occurring viral hemagglutinin lacks a membrane fusion domain, a transmembrane domain, and a cytoplasmic domain.

[0018] Another embodiment of the invention is a composition comprising a flagellin component that is at least a portion of a flagellin, wherein the flagellin component includes at least one cysteine residue and whereby the flagellin component activates a Toll-like Receptor 5.

[0019] In still another embodiment, the invention is a composition comprising a Toll-like Receptor agonist component that is at least a portion of a Toll-like Receptor agonist, wherein the Toll-like Receptor agonist component includes at least one cysteine residue in a position where a cysteine residue does not occur in the native Toll-like Receptor agonist, whereby the Toll-like Receptor agonist component activates a Toll-like Receptor.

[0020] In an additional embodiment, the invention is a composition comprising a flagellin component that is at least a portion of a flagellin, wherein at least one lysine of the flagellin component has been substituted with at least one arginine, whereby the flagellin component activates a Toll-like Receptor 5.

[0021] In yet another embodiment, the invention is a composition comprising a flagellin component that is at least a portion of a flagellin, wherein at least one lysine of the flagellin component has been substituted with at least one serine residue, whereby the flagellin component activates a Toll-like Receptor 5.

[0022] Another embodiment of the invention is a composition comprising a flagellin component that is at least a portion of a flagellin, wherein at least one lysine of the flagellin component has been substituted with at least one histidine residue, whereby the flagellin component activates a Toll-like Receptor 5.

[0023] A further embodiment of the invention is a method of stimulating an immune response in a subject, comprising the step of administering to the subject a composition that includes a flagellin component that is at least a portion of a flagellin, wherein the flagellin component includes at least one cysteine residue and whereby the flagellin component activates a Toll-like Receptor 5.

[0024] In still another embodiment, the invention is a method of stimulating an immune response in a subject, comprising the step of administering to the subject a composition that includes a flagellin component that is at least a portion of a flagellin, wherein at least one lysine of the flagellin component has been substituted with at least one arginine, whereby the flagellin component activates a Toll-like Receptor 5.

[0025] An additional embodiment of the invention is a method of stimulating an immune response in a subject, comprising the step of administering to the subject a composition that includes a flagellin component that is at least a portion of a flagellin, wherein at least one lysine of the flagellin component has been substituted with at least one serine residue, whereby the flagellin component activates a Toll-like Receptor 5.

[0026] In another embodiment, the invention is a method of stimulating an immune response in a subject, comprising the step of administering to the subject a composition that includes a flagellin component that is at least a portion of a flagellin, wherein at least one lysine of the flagellin component has been substituted with at least one histidine residue, whereby the flagellin component activates a Toll-like Receptor 5.

[0027] In yet another embodiment, the invention is a method of stimulating an immune response in a subject, comprising the step of administering to the subject a composition that includes a Toll-like Receptor agonist component that is at least a portion of a Toll-like Receptor agonist, wherein the Toll-like Receptor agonist component includes at least one cysteine residue in a position where a cysteine residue does not occur in the native Toll-like Receptor agonist, whereby the Toll-like Receptor agonist component activates a Toll-like Receptor agonist.

[0028] The methods and composition of the invention can be employed to stimulate an immune response, in particular, a protective immune response, in a subject. Advantages of the claimed invention include, for example, cost effective methods and compositions that can be produced in relatively large quantities for use in the prevention and treatment of disease associated with viral influenza infection. The claimed methods and compositions can be employed to prevent or treat viral influenza infection and, therefore, avoid serious illness and death consequent to viral influenza infection.

### BRIEF DESCRIPTION OF THE FIGURES

[0029] FIG. 1 depicts a ribbon diagram of PR8 influenza A hemagglutin (HA) crystal structure (1RU7). Schematically presentations from left to right are HA trimer, monomer, the globular head domain and the three choices of vaccine candidates. Molecules or domains of interest are highlighted by dotted circle, such as the monomer in trimer structure and the globular head domain within the monomer structure. The domain boundaries of three vaccine candidates are marked by the cross signs. The residue numbers of each selection are also labeled in the individual vaccine presentation.

[0030] FIG. 2 depicts a hydrophobicity plot analysis of the B/Lee/40 HA (SEQ ID NO: 36) using ProtScale (http://ca.expasy.org/tools→Primary structure analysis→ProtScale) to confirm that the selected boundaries were in the hydrophilic regions of the protein.

[0031] FIG. 3 depicts a sandwich ELISA analysis of STF2.HA B strain proteins. ELISA plates were coated with antibody to flagellin, and the indicated proteins were incubated to allow capture. Proteins were detected using ferret antisera against B/Malaysia/2506/2004 and enzyme-labeled goat anti-ferret antibodies.

[0032] FIG. 4 depicts the TLR bioactivity of STF2.HA B strain proteins. HEK293 (TLR5+) cells were incubated with the indicated proteins overnight, and the cell culture supernatants were harvested and assessed for IL-8 by ELISA.

[0033] FIG. 5 depicts the TLR bioactivity of STF2.HA B strain proteins. HEK293 (TLR5+) cells were incubated with the indicated proteins overnight, and the cell culture supernatants were harvested and assessed for IL-8 by ELISA.

[0034] FIG. 6 depicts the dose-dependent antibody response to STF2.HA1-2(PR8) (SEQ ID NO: 90) in BALB/c mice. Mice (10/group) were immunized as indicated on days 0 and 14, and bled on days 12 and 21. Anti-HA IgG responses on Day 28 were examined by ELISA. Convalescent antisera (x) were included as a positive control. The data depict the mean±SD of 10 individual sera per group.

[0035] FIG. 7 depicts serum reactivity with influenza infected cells in vitro. The day 21 serum samples depicted in FIG. 6 were incubated with mock- and PR/8/34-infected MDCK cells. The data represent the OD₄₅₀ mean±SD of 10 individual sera/group.

[0036] FIG. 8A depicts survival of BALB/c mice immunized with STF2.HA1-2(PR8) (SEQ ID NO: 90). Mice from FIGS. 8 and 9 were challenged on day 28 with an LD₉₀ (8×10³ EID) of influenza A PR/8/34 administered intranasally (Day 0 post-challenge).

[0037] FIG. 8B depicts weights of BALB/c mice immunized with STF2.HA1-2(PR8) (SEQ ID NO: 90). Mice from FIGS. 6 and 7 were challenged on day 28 with an LD₉₀ (8×10³ EID) of influenza A PR/8/34 administered intranasally (Day 0 post-challenge). Graph reflects the average weight per group based on individual animals measured daily for 19 days.

[0038] FIG. 8C depicts clinical Score of BALB/c mice immunized with STF2.HA1-2(PR8) (SEQ ID: NO 90). Mice from FIGS. 6 and 7 were challenged on day 28 with an LD₉₀ (8×10³ EID) of influenza A PR/8/34 administered intranasally (Day 0 post-challenge). Graph reflects the average clinical score per group based on individual animals measured daily for 19 days. Clinical scores were assessed as follows: 4 pts=healthy, 3 pts=reduced grooming, 2 pts=reduced physical activity and 1 pt=moribund.

[0039] FIG. 9 depicts neutralization activity of immune sera from BALB/c mice immunized with the indicated doses of STF2.HA1-2(PR8) (SEQ ID NO: 90) on days 0 and 14, and bled on day 21. The endpoint titer of each sample was calculated as the titer that inhibited virus-mediated lysis of the cells by at least 50%. Geometric mean titers±SD were calculated for each dose group and plotted.

[0040] FIGS. 10A and 10B depict anti-HA antibody response of BALB/c mice immunized with 3 μg of STF2.HA1-2(PR8) (SEQ ID NO: 90), or 3 or 0.3 μg of STF2.HA1-2(VN) (SEQ ID NO: 95) s.c. on days 0 and 14. On day 21, sera were isolated and examined for reactivity with (FIG. 10A) HA purified from Influenza A/Viet Nam/1203/2004 (obtained from BEI Resources Cat# NR-660)) and (FIG. 10B) recombinant flagellin (STF2) (SEQ ID NO: 96) by ELISA.

[0041] FIG. 11 depicts a flow chart of the steps required to express pFastBac constructs using Bac-to-Bac Baculovirus Expression system.

[0042] FIGS. 12A and 12B depict an anti-HA specific IgG responses in BALB/c mice immunized with STF2.HA1-1 fusion proteins. Mice (10/group) were immunized with indicated STF2.HA1-1 fusion proteins on days 0 and 14, and bled on day 21. Anti-HA and anti-flagellin IgG responses were examined by ELISA. Convalescent antisera were included as a positive control. The data depict the mean±SD of 10 individual sera per group.

[0043] FIG. 13A depicts survival of BALB/c mice immunized with recombinant STF2.HA1-1 proteins. On day 28, animals in FIG. 12 were challenged i.n. with an LD₉₀ (8×10³ EID) of influenza A PR/8/34. The survival of individual mice was monitored for 21 days post challenge.

[0044] FIG. 13B depicts weight of BALB/c mice immunized with recombinant STF2.HA1-1 proteins. On day 28, animals in FIG. 12 were challenged i.n. with an LD₉₀ (8×10³ EID) of influenza A PR/8/34. Graph reflects the average weight per group based on individual animals measured daily for 21 days.

[0045] FIG. 13C depicts clinical assessment of BALB/c mice immunized with recombinant STF2.HA1-1 proteins. On day 28, animals in FIG. 12 were challenged intranasally (i.n.) with an LD₉₀ (8×10³ EID) of influenza A PR/8/34. Graph reflects the average weight per group based on individual animals measured daily for 21 days. Clinical scores were assessed as follows: 4 pts=healthy, 3 pts reduced grooming, 2 pts=reduced physical activity and 1 pt=moribund.

[0046] FIG. 14 depicts anti-HA antibody titers of mice following immunization with 10 μg STF2.HA1-2(VN).

[0047] FIG. 15 depicts an anti-HA antibody titers of mice following immunization with 3 μg STF2.HA1-2(VN).

[0048] FIG. 16 depicts an anti-HA antibody titers of mice following immunization with 1 μg STF2.HA1-2(VN).

[0049] FIG. 17 depicts a survival of mice following challenge with 10 LD₉₀ of influenza A/Viet Nam/1203/04

[0050] FIG. 18 depicts the amino acid sequence of full-length flagellin (STF2) highlighting important domains and residues. Gray=experimentally-defined TLR5 binding site (Smith, et al., 2003); K=lysine residues; underline=flagellin sequences corresponding to STF2Δ construct (linker not shown).

[0051] FIG. 19 depicts a space-filling model of flagellin (STF2) with the TLR5 activation site (left panel) and lysine residues (right panel) highlighted in gray.

[0052] FIG. 20 depicts a space-filling model of flagellin (STF2) with residues retained in STF2Δ highlighted in black.

[0053] FIG. 21 depicts a schematic depiction of the two-step PCR cloning of pMT/STF2Δ.

[0054] FIG. 22 depicts recognition of flagellin epitopes of STFΔ proteins in ELISA.

[0055] FIG. 23 depicts TLR5-dependent secretion of IL-8 following stimulation of HEK293 cells with the indicated STF2Δ proteins.

[0056] FIG. 24 depicts the S200 chromatogram of STF2Δ.HingeCys:CysH1C1. Void=column void volume; conjugate=elution peak of protein: peptide conjugate; A260, A280 and conductivity are indicated.

[0057] FIG. 25 depicts TLR5-dependent secretion of IL-8 following stimulation of RAWhTLR5 cells (closed symbols) or TLR5-negative RAW cells (open symbols) with STF2Δ.HingeCys (squares), STF2Δ.HingeCys:CysH1C1 conjugate (circles), or STF2.OVA (triangles).

[0058] FIG. 26 depicts the S200 chromatogram of STF2.4×H1C1. Void=column void volume; conjugate=elution peak of protein: peptide conjugate; A260, A280 and conductivity are indicated.

[0059] FIG. 27 depicts an anti-H1C1 antibody response of BALB/c mice immunized with native H1C1 peptide or Pam3Cys.H1C1 peptide.

[0060] FIG. 28 depicts a survival plot of BALB/c mice immunized with native H1C1 peptide or Pam3Cys.H1C1 peptide then challenged with an LD₉₀ of influenza A/Puerto Rico/8/34 virus.

[0061] FIG. 29 depicts the amino acid sequence of Salmonella typhimurium flagellin type 2 (fljB/STF2) with the hinge region underlined (SEQ ID NO: 498).

[0062] FIG. 30 depicts the nucleic acid sequence (SEQ ID NO: 499) encoding SEQ ID NO: 498. The nucleic acid sequence encoding the hinge region is underlined.

[0063] FIG. 31 depicts the amino acid sequence of fljB/STF2 without the hinge region (also referred to herein as “fljB/STF2Δ” or “STF2Δ”) (SEQ ID NO: 500).

[0064] FIG. 32 depicts the nucleic acid sequence (SEQ ID NO: 501) encoding SEQ ID NO: 500.

[0065] FIG. 33 depicts the amino acid sequence of E. coli flagellin fliC (also referred to herein as “E. coli fliC”) with the hinge region underlined (SEQ ID NO: 502).

[0066] FIG. 34 depicts the nucleic acid sequence (SEQ ID NO: 503) encoding SEQ ID NO: 502. The nucleic acid sequence encoding the hinge region is underlined.

[0067] FIG. 35 depicts the amino acid sequence of S. muenchen flagellin fliC (also referred to herein as “S. muenchen fliC”) with the hinge region underlined (SEQ ID NO: 504).

[0068] FIG. 36 depicts the nucleic acid sequence (SEQ ID NO: 505) encoding SEQ ID NO:504. The nucleic acid sequence encoding the hinge region is underlined.

[0069] FIG. 37 depicts the amino acid sequence of pMT/STF2. The linker is underlined and the sequence of the BiP secretion signal is bolded (SEQ ID NO: 506).

[0070] FIG. 38 depicts the nucleic acid sequence (SEQ ID NO: 507) of SEQ ID NO: 506. The nucleic acid sequence encoding the linker is underlined and the nucleic acid sequence encoding the BiP sequence is bolded.

[0071] FIG. 39 depicts a Pam3Cys.M2e fusion protein. The amino acid sequence (SEQ ID NO: 510) of M2e is shown in bold type.

[0072] FIG. 40 depicts the activation of an antigen-presenting cell (APC) by Toll-like Receptor (TLR) signaling.

[0073] FIGS. 41A and 41B depict plasmid constructs to express an amino-terminus of an M2 (e.g., SEQ ID NOS: 510, 554) of H1 and H5 (SEQ ID NO: 536) influenza A viral isolates. pMT: metallothionein promoter-based expression vector. BiP: secretion signal sequence of immunoglobulin-binding protein. STF2: full-length flagellin of S. typhimurium. STF2Δ: hinge region-deleted STF2. MCS: multiple cloning site.

[0074] FIG. 42 depicts plasmid constructs designed to express HA of H1 and H5 influenza A virus isolates. AOX1: AOX1 promoter of pPICZα expression vector (Invitrogen Corporation, Carlsbad, Calif.). αf: secretion signal sequence of yeast. STF2: full-length flagellin of S. typhimurium. STF2Δ: hinge region-deleted STF2. MCS: multiple cloning site.

[0075] FIG. 43 depicts the amino acid sequence (SEQ ID NO: 561) of HA (PR8).

[0076] FIG. 44 depicts the nucleic acid sequence (SEQ ID NO: 562) encoding SEQ ID NO: 561.

[0077] FIG. 45 depicts the amino acid sequence (SEQ ID NO: 563) of E. coli fliC without the hinge region.

[0078] FIG. 46 depicts the amino acid sequence of pMT/STF2Δ (SEQ ID NO: 585). The linker sequence is underlined and the BiP secretion signal is bolded.

[0079] FIG. 47 depicts the nucleic acid sequence (SEQ ID NO: 586) encoding SEQ ID NO: 585. The nucleic acid sequence encoding the linker is underlined and the nucleic acid sequence encoding the BiP secretion signal is bolded.

[0080] FIG. 48 depicts the amino acid sequence (SEQ ID NO: 595) of the Salmonella muenchen fliC without the hinge region, which is also referred to herein as “S. muenchen fliCΔ.”

[0081] FIG. 49 depicts the nucleic acid sequence of Salmonella muenchen fliC (SEQ ID NO: 596) encoding SEQ ID NO: 595.

[0082] FIG. 50 depicts IL-8 secretion following stimulation of TLR5+ cells.

[0083] FIG. 51 depicts TNF secretion following stimulation of TLR2+ cells.

[0084] FIG. 52 depicts M2e-specific IgG.

[0085] FIG. 53 depicts the OVA-specific IgG.

[0086] FIG. 54 depicts the M2e-specific IgG serum titers.

[0087] FIG. 55 depicts the M2e-specific serum IgG titer post-boost.

[0088] FIG. 56 depicts the Pam3Cys.M2e dose response.

[0089] FIG. 57 depicts the M2e-specific serum IgG titer.

[0090] FIG. 58 depicts the rabbit IgG response to M2e.

[0091] FIG. 59 depicts the immunogenicity of STF2.4×M2e in a rabbit 14 days post-prime.

[0092] FIG. 60 depicts the survival of BALB1c mice following challenge. Mice were immunized on days 0 and 14 as indicated in the legend and challenged on day 28 by intranasal administration of an LD₉₀ of influenza A/Puerto Rico/8/34 virus (Day 0 post-challenge). Mice were monitored for survival for 21 days post-challenge.

[0093] FIG. 61 depicts fusion constructs in a pET24 vector. T7:T7 promoter; lacO: lac operator; STF2: Salmonella typhimurium flagellin; STF2Δ=STF2 with the hinge region deleted; EIII⁺ is domain III of a West Nile envelope protein with 6 amino acids of domain I amino acid.

[0094] FIGS. 62A and 62B depict TLR5 bioactivity of STF2.EIII+ (SEQ ID NOS: 657, 658) and STF2ΔEIII+ (SEQ ID NOS: 673, 674) fusion proteins. Serial dilutions of purified proteins were added to HEK293 (TLR5+) cells overnight and IL-8 content of the supernatants measured by ELISA. Purified STF2.OVA was used as a positive control (FIG. 129A). The TLR2 agonist Pam3CSK4 was used as a negative control (FIG. 129B).

[0095] FIG. 63 depicts STF2Δ.EIII+ antigenic epitopes assessed by ELISA. Plates were coated with full-length WNE (open bars) (SEQ ID NO: 642) or STF2Δ.EIII+ (SEQ ID NOS: 673,674) and probed with the indicated antibodies (mAb). Poly=polyclonal antiserum to WNE; 3D9 through 7H2=neutralizing monoclonal antibodies to WNE epitopes; anti-flagellin=monoclonal antibody to flagellin.

[0096] FIGS. 64A, 64B, 64C and 64D depict reactivity of STF2.E (SEQ ID NOS: 761, 762); STF2.EIII+ (SEQ ID NOS:657, 658) and STF2Δ.EIII+ (SEQ ID NOS:673,674) fusion proteins with antibodies to WNE and flagellin. Plates were coated with fusion proteins, blocked and incubated with antibodies to WNE or flagellin. Antibody reactivity was detected following incubation with HRP-labeled species specific IgG. Plates were developed in the presence of TMB substrate and O.D.450/650 using a TECAN plate reader and Magellian software.

[0097] FIG. 65 depicts IgG serum following injection with fusion proteins. Mice were immunized with either PBS, Drosophila conditioned medium containing STF2.E (CM, positive control), 25 μg of STF2Δ.EIII+ (SEQ ID NOS:673, 674) i.p., 25 μg STF2Δ.EIII+ s.c., 25 μg STF2.EIII+ (SEQ ID NO:659,658) i.p., 25 μg STF2.EIII+ (SEQ ID NOS:657,658) or 25 μg STF2.E (SEQ ID NOS: 761, 762). On day 35, immunized animals were challenged with WNV. Sera from individual mice (day 35) were characterized by direct ELISA to determine IgG levels. Purified WNV-E protein (SEQ ID NO:642) was used as the antigen in this assay. This antigen (60) was produced in Drosophila as a his-tagged protein.

[0098] FIG. 66 depicts STF2Δ.EIII+ (SEQ ID NOS: 673 674) and STF2.EIII+ (SEQ ID NOS: 657, 658) protective immunity to WNV viral challenge. Mice were immunized and challenged with a lethal dose of WNV strain 2741 on day 35. Survival was monitored for 21 days.

[0099] FIG. 67 depicts IgG sera titers following immunization with fusion proteins. STF2Δ.EIII+ proteins induce WNV-specific IgG antibodies. Mice were immunized s.c. on days 0, 14 and 28 with PBS alone or about 25 μg of STF2Δ.EIII+ (SEQ ID NOS: 673, 674) (045 [positive control]), STF2Δ.EIII+ (067, trimer), STF2Δ.EIII+ (070, monomer) or STF2Δ.EIIIs+ (SEQ ID NOS: 675, 676) (069). On day 35 sera from individual mice were characterized by direct ELISA to determine IgG levels. Purified WNV-E protein (060, produced in Drosophila as a his-tagged protein) was used as the antigen in this assay.

[0100] FIG. 68 depicts STF2Δ.EIII+ (SEQ ID NOS: 673, 674) and STF2Δ.EIIIs+ (SEQ ID NOS: 675, 673) protective immunity in mice from WNV lethal challenge. On day 38 following immunization with fusion proteins, all groups were challenged with a lethal dose of WNV strain 2741 and survival was monitored for 21 days. Survival for each group (10 mice/group) is indicated as a percentage.

[0101] FIG. 69 depicts competition assays. Serial dilutions (five fold starting at 1:25) of antisera from immunized animals were incubated with biotinylated WNE protein (SEQ ID NO: 642) and then added to the wells of ELISA plates coated with mAb 7H2 at about 2 mg/ml. Wells were developed using avidin-HRP to determine inhibition of West Nile protein binding as a results of competition with mAb 7H2.

[0102] FIG. 70 depicts epitope mapping of the antibody response induced by STF2Δ.EIII+ (SEQ ID NOS: 675,676) fusion proteins. Immune sera from animals immunized with indicated STF2Δ-fusion proteins (E2-21, E27-E52, FIG. 142) were examined for the ability to recognize overlapping peptides corresponding to the junction of domains I and III of the WNV envelope protein.

[0103] FIG. 71 depicts epitope mapping of the antibody response induced by STFΔ.EIIIs+ (SEQ ID NOS: 675, 676) E-21 (envelope protein) epitope fusion proteins. Immune sera from animals immunized with the indicated STF2Δ-fusion proteins (E2-21, E2-21-1(S,C), E2-21-2(C,S), E2-21-2(C,S) and E2-21-4 through E2-21-24, see FIG. 139) were evaluated to identify the residues defining the E-21 epitope of West Nile envelope protein. Data reflects the response of sera to E-21 following the substitution of cysteine with serine (indicated by C,S); and the sequential replacement of amino acids with alanine. The peptides tested are listed in FIG. 139.

[0104] FIG. 72 depicts Pam3Cys.WNV001 (SEQ ID NO: 771) inducing EIII specific IgG antibodies. Mice were immunized s.c. on days 0, 14 and 28 with PBS alone, 22 mg of unmodified WNV001 (SEQ ID NO: 771) or 30 μg of Pam3Cys.WNV001. On day 35 sera from individual mice were characterized by direct ELISA to determine IgG levels to synthetic WNV001 peptide.

[0105] FIG. 73 depicts the amino acid sequences (SEQ ID NOS: 691-698) of the EI/EIII junction for West Nile, Japanese encephalitis and Dengue (serotypes 1 through 4) viruses. The West Nile epitope identified using antisera from STF2Δ.EIIIs+ immunized animals is underlined. This sequence corresponds to peptide E2-21 (SEQ ID NO: 728).

[0106] FIG. 74 depicts a tripalmitoylated peptide.

[0107] FIG. 75 depicts the D1 domain, D2 domain, TLR5 activation domain and hypervariable (D3 domain) of flagellin.

[0108] FIG. 76 depicts the D1 domain, D2 domain, TLR5 activation domain and hypervariable (D3 domain) of flagellin (Yonekura, et al. Nature 424, 643-650 (2003)).

[0109] FIG. 77 depicts the D0, D1, D2 and D3 domains of flagellin and regions in the D2 and D3 domains suitable for insertion or substitution with antigens (e.g., maturational cleavage site, HA, M2e).

[0110] FIG. 78 depicts the amino acid sequence of Pseudomonas aeruginosa flagellin (SEQ ID NO: 815). Lysine residues are indicated by the asterisks.

[0111] FIG. 79 depicts the amino acid sequence of a S. typhimurium flagellin (SEQ ID NO: 816). Lysine residues are indicated by the asterisks.

[0112] FIG. 80 depicts the amino acid sequence (SEQ ID NO: 820) of Listeria monocytogenes flagellin (GenBank Accession No: Q92DW3). Lysine residues are indicated by the asterisks.

### DETAILED DESCRIPTION OF THE INVENTION

[0113] The features and other details of the invention, either as steps of the invention or as combinations of parts of the invention, will now be more particularly described and pointed out in the claims. It will be understood that the particular embodiments of the invention are shown by way of illustration and not as limitations of the invention. The principle features of this invention can be employed in various embodiments without departing from the scope of the invention.

[0114] The invention generally is directed to methods of making compositions, and to compositions, that stimulate an immune response in a subject, such as a protective immune response, and methods of treatment, such as by administering the composition to a subject.

[0115] “Stimulating an immune response,” as used herein, refers to the generation of antibodies and/or T-cells to at least a portion of an antigen, such as the protein portions of hemagglutinin (HA) (e.g., HA1-1, HA1-2 proteins) described herein. The antibodies and/or T-cells can be generated to at least a portion of an influenza viral protein (e.g., HA and M2 proteins of influenza A, B and/or C).

[0116] Stimulating an immune response in a subject can include the production of humoral and/or cellular immune responses that are reactive against the antigen, such as a viral protein, in particular, an influenza viral protein.

[0117] The compositions of the invention for use in methods to stimulate immune responses in subjects, can be evaluated for the ability to stimulate an immune response in a subject using well-established methods. Exemplary methods to determine whether the compositions of the invention stimulate an immune response in a subject, include measuring the production of antibodies specific to the antigen (e.g., IgG antibodies) by a suitable technique such as, ELISA assays; the potential to induce antibody-dependent enhancement (ADE) of a secondary infection; macrophage-like assays; neutralization assessed by using the Plaque Reduction Neutralization Test (PRNT₈₀); and the ability to generate serum antibodies in non-human models (e.g., mice, rabbits, monkeys) (Putnak, et al., Vaccine 23:4442-4452 (2005)).

[0118] “Stimulates a protective immune response,” as used herein, means administration of the compositions of the invention, such as hemagglutinin (HA) proteins (e.g., HA1-1, HA1-2 proteins described herein), results in production of antibodies to the protein to thereby cause a subject to survive challenge by an otherwise lethal dose of a viral protein, such as viral HA. Techniques to determine a lethal dose of a virus (e.g., an influenza virus) are known to one of skill in the art (see, for example, WHO/CDS/CSR/NCS2002.5 “WHO Manual on Animal Influenza Diagnosis and Surveillance” World Health Organization, Dept of Communicable Disease Surveillance and Response, WHO Global Influenza Programme; Harmon, M. W., et al., J. Clin. Microbiol. 26:333-337 (1988); Reed, L. J., et al., Am. J. Hyg. 27:493-497 (1938); Rose, T., et al., J. Clin. Microbiol. 37:937-943 (1999); Walls, H. H. et al., J. Clin. Microbiol. 23:240-245 (1986); Current Protocols in Immunology, 19.11.1-19.11.32, Cottey, R., et al., John Wiley & Sons, Inc (2001)). Exemplary techniques for determining a lethal dose can include administration of varying doses of virus and a determination of the percent of subjects that survive following administration of the dose of virus (e.g., LD₁₀, LD₂₀, LD₄₀, LD₅₀, LD₆₀, LD₇₀, LD₈₀, LD₉₀). For example, a lethal dose of a virus that results in the death of 50% of a population of subjects is referred to as an “LD₅₀”; a lethal dose of a virus that results in the death of 80% of a population of subjects is referred to herein as “LD₈₀”; a lethal dose of a virus that results in death of 90% of a population of subjects is referred to herein as “LD₉₀.”

[0119] For example, determination of the LD₉₀ can be conducted in subjects (e.g., mice) by administering intranasally varying doses (e.g., dilutions, such as log and half-log dilutions of 8×10³ egg-infectious doses (EID)) followed by an assessment of the survival of the subjects about 14 days to about 21 days after infection with the virus. Protective immunity can be assessed by physical appearance of the subject, general demeanor (active), weight (initial loss of weight followed by return to a weight about the weight of the subject prior to infection with the virus) and survival after about 14 to about 21 days following infection with the virus.

[0120] Assessment of stimulation of protective immunity can also be made by employing assays that assess the ability of the antibodies produced in response to the compositions of the invention (e.g., a portion of the protein of the naturally occurring virus, such as a protein portion of hemagglutinin) to neutralize binding of the viral protein (e.g., hemagglutinin protein) to a host cell (see, for example, Current Protocols in Immunology, 19.11.1-19.11.32, Cottey, R., et al., John Wiley & Sons, Inc (2001)). Assessment of stimulation of protective immunity can also be made by employing assays that measure the ability of antibodies to inhibit hemagglutinin binding (see, for example, Burnett, F. M., et al., J. exp. Biol. Med. Sci. 25:227-233 (1947); Salk, J. E. J. Immunol. 49:87-98 (1944); Current Protocols in Immunology, 19.11.1-19.11.32, Cottey, R., et al., John Wiley & Sons, Inc (2001)).

[0121] It is believed that inhibition of hemagglutinin binding is indicative of the ability of antibodies, formed from the compositions and by the methods of the invention, to neutralize the sialic acid binding sites of the naturally occurring viral hemagglutinin (“neutralization of HA binding”) and, thereby, prevent infection of the host cell as a consequence of stimulating a protective immune response. Inhibition or neutralization of hemagglutinin binding is believed to correlate with an ability of an immune response to protect against a lethal dose of virus.

[0122] Neutralization of HA binding can be assessed by in vitro assays (See, for example, Current Protocols in Immunology 19.11.1-19.11.32, Cottey, R., et al., Suppl. 42, John Wiley & Sons, Inc. (2001) and WHO Manual on Animal Influenza Diagnosis and Surveillance, Webster, R., et al., pages 28-36, 48-54, 82-92 (2002)). Exemplary viral neutralization assays rely on the ability of serum to specifically bind and prevent replication of influenza virus in culture, such as in the Madin-Darby Canine Kidney (MDCK) cell line. Briefly, cells are cultured in 96 well plates in the presence of a previously titered virus and the cytopathic effect of the replicating virus is observed under a microscope. To test serum, serial dilutions of the serum are prepared and preincubated with the viral stock for 2 hours at 37° C. prior to infecting the MDCK cells. The mixture is incubated for an additional 2 hours after which the virus/serum mixture is removed and replaced with fresh media. The cells are grown for 4 days. Wells are scored as positive for viral growth if at least about 50% of the cells are dead in at least about half of the wells for a given serum dilution. The reciprocal of the highest dilution of serum which protects at least about half of the cells from death, in at least about half of the wells, is considered the neutralization titer.

[0123] Alternatively, a micro-neutralization in vitro assay can be performed to assess neutralization of HA binding. For example, serum is diluted and preincubated with a known titer of virus and mixed with MDCK cells, as described above. After 2 days of incubation, cells are washed and fixed with acetone. The plates are developed as an ELISA using a monoclonal antibody to the influenza nuclear antigen NP. A microneutralization titer is determined as the reciprocal of the highest dilution which yields less than about 50% of the anti-NP reading of the virus-only control wells.

[0124] The Hemagglutination Inhibition (HAI) assay is based on the HA antigen on the surface of the influenza virus agglutinating red blood cells (RBC) and preventing red blood cells from precipitating. Antibodies that specifically bind the sialic acid-binding regions of HA prevent agglutination allowing precipitation. The assay is performed in 96 well V bottom plates with fresh chicken RBC. A stock of viral antigen is titered so that about a 4-fold excess of antigen is present relative to the minimum amount needed to prevent precipitation. The test serum, which can be from several species including mouse, ferret, poultry or human, is heated to about 56° C. to inactivate complement. Serial 2-fold dilutions of the inactivated serum are performed and mixed with the stock HA. After about 30 minutes at room temperature, the RBCs are added and the plate is incubated for about 30 to about 45 minutes. Results are scored by observations: agglutination results in cloudy wells while inhibition results in a “button” of red cells precipitated at the bottom of the well. Controls include RBC with no HA, which forms a button, and HA and RBC with no serum, which remains cloudy. The HAI titer of a particular serum sample is the reciprocal of the last dilution which prevents agglutination (i.e., forms a button). For example, if about a 1:128 dilution reads as a button but the 1:256 dilution does not, the HAI titer is about 128.

[0125] In one embodiment, the invention is a method of making a protein that stimulates a protective immune response in a subject, comprising the steps of separating a portion of a protein from a naturally occurring viral hemagglutinin to thereby make a protein portion, wherein the protein portion includes at least a portion of a globular head and at least a portion of at least one secondary structure that causes the globular head to essentially retain its tertiary structure, and wherein the protein portion lacks a membrane fusion domain, a transmembrane domain and a cytoplasmic domain. The nucleic acid sequence encoding the protein portion is transformed into a prokaryotic cell and the prokaryotic host cell is cultured to thereby make the protein that stimulates a protective immune response in a subject.

[0126] “A portion of a protein,” or “protein portion,” as used herein in reference to a naturally occurring viral hemagglutinin, refers to any part of the naturally occurring viral hemagglutinin that is less than the entire naturally occurring viral hemagglutinin. “Naturally occurring viral hemagglutinin,” as used herein, refers to the entire viral hemagglutinin, as it occurs in nature.

[0127] The protein portion can further lack a signal sequence. The protein portion can further include a sialic acid binding site.

[0128] Portions of a protein of a naturally occurring viral hemagglutinin for use in the compositions and methods of the invention can be a portion of Orthomyxoviridae (influenza A, B, C), Paramyxovirus (parainfluenza, respiratory syncytial virus, Newcastle disease virus, Nipah, Measles, canine distemper, Sendai virus), Reoviridae (rotavirus), Parvoviridae (human parvovirus, porcine parvovirus), Orthopoxvirus (Monkeypox virus, Ectromelia virus), Flaviviridae (West Nile, Japanese Encephalitis, St. Louis, Murray Valley, Kunjin), Avipoxvirus (Chicken fowlpox), Nipah virus (Guillaume V., et al., J. Virol., 80:7546-54 (2006)); Canine distemper virus (Singethan K., et al., J Gen Virol., 87:1635-42 (2006)); Newcastle disease virus, (de Leeuw O. S., et al., J Gen Virol., 86:1759-69 (2005); and Melanson V. R., et al., J Virol., 78:13053-61 (2004); Deng R., et al., Virology, 204:17-26; (1994)), Measles (Masse N., et al., J Virol., 78:9051-63 (2004)), Sendai virus (Tomasi M., et al., FEBS Lett., 11:56-60 (2003)), Human parainfluenza (Porotto M., et al., J Virol., 79:2383-92 (2005); Tsurudome M., et al., Virology, 213:190-203 (1995); Bousse T., et al., Virology, 209:654-7 (1995); and Takimoto T., et al., J Virol., 66:7597-600 (1992)).

[0129] Portions of a viral hemagglutinin (“protein portions”) (e.g., an influenza A, an influenza B and an influenza C viral hemagglutinin) can include at least one member selected from the group consisting of protein portions referred to herein as “HA1-1,” “HA1-2” and “HA1-3.”

[0130] “HA1-1,” as used herein, refers to a protein portion of a viral hemagglutinin that includes at least about one β-sandwich that includes the substrate binding site, which includes at least about two β-sheets, at least about two to about three short α-helixes, at least one small β-sheet and at least one additional small β-sandwich at the bottom of the molecule and at least about four disulfide bonds. The β-sandwich that includes the substrate binding site of the HA1-1 includes at least about four β-strands as the top sheet and at least about three to about four β-strands as the bottom sheet. At least about one α-helix of the HA1-1 portion is located by the side of β-sandwich that includes the substrate binding site and at least about one to about two are located at the bottom of the β-sandwich that includes the substrate binding site. The small β-sandwich of the HA1-1 can include at least about two to about three β-strands in each β-sheet; or about three to about four β-strands. Exemplary HA1-1 protein portions include SEQ ID NOS: 8, 11, 14, 17, 20, 38, 40, 45, 47, 49, 179, 180, 181 and 182.

[0131] “HA1-2,” as used herein, refers to a protein portion of a viral hemagglutinin that includes at least about one β-sandwich that includes the substrate binding site, at least about two to about three short α-helixes, at least about one small β-sheet at the bottom of the molecule and at least about two disulfide bonds. A β-strand in a viral hemagglutinin can include between about two to about 15 amino acids. A small β-strand can include about two amino acids; or between about two to about three amino acids; or between about two to four amino acids or between about two to about five amino acids. A small β-sheet can include between about two to about three β-strands; or between about three to about four β-strands. The β-sandwich that includes the substrate binding site of HA1-2 can further include at least about four β-strands as the top sheet and at least about three to about four β-strands as the bottom sheet. At least about one α-helix of the HA1-2 portion is located by the side of the β-sandwich that includes the substrate binding site and at least about one to about two are located at the bottom of the β-sandwich that includes the substrate binding site. Exemplary HA1-2 protein portions include SEQ ID NOS: 9, 12, 15, 18, 21, 24, 26, 28, 30, 32, 39, 41, 46, 48 and 50.

[0132] “HA1-3,” as used herein, refers to a protein portion of a viral hemagglutinin that includes at least one β-sandwich that includes the substrate binding site, at least about two short α-helixes and at least one disulfide bond. “β-sandwich,” as used herein, refers to at least about two sets of beta-sheets that form at least about one interactive layer. “Substrate binding site,” as used herein in reference to the β-sandwich, means any part of the portion of the naturally occurring viral hemagglutinin that has the capacity to interact or bind to a molecule. For example, the β-sandwich that includes the substrate binding site of the portion can include a portion that binds sialic acid. The β-sandwich that includes the substrate binding site of HA1-3 can further include at least about four β-strands as the top sheet and at least about three β strands as the bottom sheet. At least about one α-helix of the HA1-1 portion is located by the side of the β-sandwich that includes the substrate binding site and at least one other α-helix is located at the bottom of the β-sandwich that includes the substrate binding site. A short α-helix can include less than about 5 turns (2, 3, 4, 5 turns) in an α-helix. An α-helix in a viral hemagglutinin can be between one to about 15 turns; or between about two to 15 turns. Exemplary HA1-3 protein portions include SEQ ID NOS: 10, 13, 16, 19, 22, 25, 27, 29, 31 and 33.

[0133] “A sialic acid binding site,” as that phrase is used herein in reference to the portion of the protein from the naturally occurring viral hemagglutinin, means a part of the protein portion that has the capacity to interact with sialic acid residues. “A sialic acid binding site” is also referred to herein as “a sialic acid binding domain.”

[0134] “At least a portion,” as used herein, refers to any part of a component (e.g., a globular head, a secondary structure) or molecule (e.g., a protein, antigen, Toll-like Receptor, a peptide, flagellin, HA, matrix 2 protein (M2), matrix 2 ectodomain (M2e)); or the entirety of the component or the molecule. “At least a portion,” is also referred to herein as a “fragment.”

[0135] “At least a portion,” as used herein in reference to a flagellin (e.g., fljB/STF2, E. coli fliC, S. muenchen fliC), refers to any part of the flagellin (e.g., motif C; motif N; domain 1, 2, 3) or the entirety of the flagellin that can initiate an intracellular signal transduction pathway for a Toll-like Receptor.

[0136] A single polypeptide can exhibit several types of secondary structure. Without any stabilizing interactions, a polypeptide can assume a random-coil conformation. However, secondary structures, such as alpha(α)-helices and beta(β)-strands, can stabilize a protein or a portion of a protein. Lateral association of β-strands form β-sheets (also referred to herein as “β-pleated sheets”). Secondary structures can be located at the surfaces of the portion, the protein, or the naturally occurring protein (e.g., viral hemagglutinin, flagellin, M2e). A tertiary structure of a protein is the three-dimensional arrangement of amino acid residues. In contrast to secondary structure, which is stabilized by, for example, hydrogen bonds, α-helices, β-strands, tertiary structure results from hydrophobic interactions between non-polar side chains of the portion, protein or naturally occurring viral hemagglutinin. The hydrophobic interactions hold the helices strands in random coils in a compact internal scaffold. The size and shape of a protein can depend on its primary amino acid sequence, as well as the number, size and arrangement of secondary structures.

[0137] “A globular head,” as that phrase is used herein, refers to a portion of a protein of a naturally occurring viral hemagglutinin that includes the receptor or sialic acid binding regions. “Globular head,” is also referred to herein as a “globular domain.” The globular head of viral hemagglutinin proteins has been determined based on x-ray crystallography as described, for example, by Wilson I. A., et al. Nature 289:366-373 (1981); Chen, J., et al., Cell 95:409-417 (1998); Ha Y., et al., The EMBO Journal 21:865-875 (2002); Russell, R. J., et al., Virology 325:287-296 (2004); and Cox, N. J., et al., In: Toply and Wilson's Microbiology and Microbial Infections, eds. B W J Mathy, et al., Vol. 1 (9^{th} ed.) New York, N.Y., Oxford Univ. Press, Ch. 32, p. 634 (1998). The globular head of a naturally occurring viral hemagglutinin is a component of the HA1 subunit of, for example, influenza viral hemagglutinin. In addition to the receptor binding domain, the globular head can include the E subdomain and F subdomain as described, for example, by Ha, Y., et al. The EMBO Journal 21:865-875 (2002).

[0138] The phrase, “causes the globular head to essentially retain its tertiary structure,” as used herein, refers to maintenance of the tertiary structure of the globular head of the naturally occurring viral hemagglutinin sufficient to stimulate a protective immune response in a subject.

[0139] The membrane fusion domain of a viral hemagglutinin is that region of the viral hemagglutinin (involved in binding of the viral hemagglutinin) that binds a host cell. A transmembrane domain of the viral hemagglutinin is that portion of the viral hemagglutinin that spans the membrane of the virus. A cytoplasmic domain of a viral hemagglutinin is that portion of the viral hemagglutinin located on the cytoplasmic surface of the virus.

[0140] The portion of the protein of the naturally occurring viral hemagglutinin (also referred to herein as “protein portion”) can further lack a signal sequence. The portion of a globular head employed in the methods described herein can include at least a portion of at least one secondary structure that includes at least a portion of at least one β-pleated sheet; at least one alpha helix and/or at least one member selected from the group consisting of a salt bridge, a leucine zipper and a zinc finger. The portion of a globular head can further include at least about one disulfide bond, at least about two disulfide bonds, at least about three disulfide bonds, at least about four disulfide bonds, at least about five disulfide bonds and at least about six disulfide bonds.

[0141] The method of making a protein that stimulates a protective immune response in a subject can further include the step of substituting a nucleic acid sequence encoding at least one amino acid residue selected from the group consisting of a hydrophilic amino acid residue, a polar amino acid residue and a neutral amino acid residue for a nucleic acid sequence that encodes at least one hydrophobic amino acid residue in the protein portion. The hydrophobic amino acid residue substituted can include at least one member selected from the group consisting of a phenylalanine residue, a tryptophan residue and tyrosine residue. The polar amino acid residue substituted for the hydrophobic amino acid can include at least one member selected from the group consisting of an aspartic acid residue and a glutamic acid residue.

[0142] The portion of a protein of a naturally occurring viral hemagglutinin can be a portion of a naturally occurring influenza viral hemagglutinin protein (e.g., influenza A, B and C). The influenza A viral hemagglutinin protein can be at least one member selected from the group consisting of H1, H2, H3, H5, H7 and H9.

[0143] The host cell employed in the methods described herein can be a prokaryotic host cell. The prokaryotic host cell can be at least one member selected from the group consisting of an E. coli prokaryotic host cell, a Pseudomonas prokaryotic host cell, a Bacillus prokaryotic host cell, a Salmonella prokaryotic host cell and a P. fluorescens prokaryotic host cell.

[0144] The method of making a protein that stimulates a protective immune response in a subject can further include the step of transforming the prokaryotic host cell with a chaperone nucleic acid sequence. The chaperone nucleic acid sequence can be at least one member selected from the group consisting of a groES-groEL chaperone, a dnaK-dnaJ-grpE chaperone, a groES-groEL-tig chaperone and a tig chaperone.

[0145] The method of making a protein that stimulates a protective immune response in a subject can further include the step of fusing at least a portion of a Toll-like Receptor (TLR) agonist to the protein. The nucleic acid sequence encoding at least a portion of a Toll-like Receptor agonist can be operably linked to the nucleic acid sequence encoding the protein portion of the viral hemagglutinin. A linker (e.g., peptide linker) can be between the Toll-like Receptor agonist and the portion of the viral hemagglutinin.

[0146] Toll-like Receptors refer to a family of receptor proteins that are homologous to the Drosophila melangogaster Toll protein. Toll-like Receptors are type I transmembrane signaling receptor proteins characterized by an extracellular leucine-rich repeat domain and an intracellular domain homologous to an interleukin 1 receptor. Toll-like Receptors include TLR1, TLR2, TLR3, TLR4, TLR5, TLR6, TLR7, TLR 8, TLR9, TLR10, TLR11 and TLR12.

[0147] “Agonist,” as used herein in referring to a TLR, means a molecule that activates a TLR signaling pathway. A TLR signaling pathway is an intracellular signal transduction pathway employed by a particular TLR that can be activated by a TLR ligand or a TLR agonist. Common intracellular pathways are employed by TLRs and include, for example, NF-κB, Jun N-terminal kinase and mitogen-activated protein kinase. The Toll-like Receptor agonist can include at least one member selected from the group consisting of a TLR1 agonist, a TLR2 agonist (e.g., Pam3Cys, Pam2Cys, bacterial lipoprotein), a TLR3 agonist (e.g., dsRNA), a TLR4 agonist (e.g., bacterial lipopolysaccharide), a TLR5 agonist (e.g., a flagellin), a TLR6 agonist, a TLR7 agonist, a TLR8 agonist, a TLR9 agonist (e.g., unmethylated DNA motifs), TLR10 agonist, a TLR11 agonist and a TLR12 agonist.

[0148] The Toll-like Receptor agonists for use in the methods and compositions of the invention can be a Toll-like Receptor agonist component that is at least a portion of a Toll-like Receptor agonist, wherein the Toll-like Receptor agonist component includes at least one cysteine residue in a position where a cysteine does not occur in the native Toll-like Receptor agonist, whereby the Toll-like Receptor agonist component activates a Toll-like Receptor.

[0149] TLR4 ligands (e.g., TLR4 agonists) for use in the compositions and methods of the invention can include at least one member selected from the group consisting of

[0150] SEQ ID NOS: 359-406 (see, PCT/US 2006/002906/WO 2006/083706; PCT/US 2006/003285/WO 2006/083792; PCT/US 2006/041865; PCT/US 2006/042051).

| | |
|---|---|
| GGKSGRTG | (SEQ ID NO: 359) |
| KGYDWLVVG | (SEQ ID NO: 360) |
| EDMVYRIGVP | (SEQ ID NO: 361) |
| VKLSGS | (SEQ ID NO: 362) |
| GMLSLALF | (SEQ ID NO: 363) |
| CVVGSVR | (SEQ ID NO: 364) |
| IVRGCLGW | (SEQ ID NO: 365) |
| AAEERTLG | (SEQ ID NO: 366) |
| WARVVGWLR | (SEQ ID NO: 367) |
| SEGYRLFGG | (SEQ ID NO: 368) |
| LVGGVVRRGS | (SEQ ID NO: 369) |
| GRVNDLWLAA | (SEQ ID NO: 370) |
| SGWMLWREGS | (SEQ ID NO: 371) |
| ERMEDRGGDL | (SEQ ID NO: 372) |
| KLCCFTECM | (SEQ ID NO: 373) |
| AVGSMERGRG | (SEQ ID NO: 374) |
| RDWVGGDLV | (SEQ ID NO: 375) |
| FFEVAKISQQ | (SEQ ID NO: 376) |
| WWYWC | (SEQ ID NO: 377) |
| MHLCSHA | (SEQ ID NO: 378) |
| WLFRRIG | (SEQ ID NO: 379) |
| YWFWRIG | (SEQ ID NO: 380) |
| MHLYCIA | (SEQ ID NO: 381) |
| WPLFPWIV | (SEQ ID NO: 382) |
| DMRSHAR | (SEQ ID NO: 383) |
| MHLCTHA | (SEQ ID NO: 384) |
| NLFPFY | (SEQ ID NO: 385) |
| MHLCTRA | (SEQ ID NO: 386) |
| RHLWYHA | (SEQ ID NO: 387) |
| WPFSAYW | (SEQ ID NO: 388) |
| WYLRGS | (SEQ ID NO: 389) |
| GKGTDLG | (SEQ ID NO: 390) |
| IFVRMR | (SEQ ID NO: 391) |
| WLFRPVF | (SEQ ID NO: 392) |
| FLGWLMG | (SEQ ID NO: 393) |
| MHLWHHA | (SEQ ID NO: 394) |
| WWFPWKA | (SEQ ID NO: 395) |
| WYLPWLG | (SEQ ID NO: 396) |
| WPFPRTF | (SEQ ID NO: 397) |
| WPFPAYW | (SEQ ID NO: 398) |
| FLGLRWL | (SEQ ID NO: 399) |
| SRTDVGVLEV | (SEQ ID NO: 400) |
| REKVSRGDKG | (SEQ ID NO: 401) |
| DWDAVESEYM | (SEQ ID NO: 402) |
| VSSAQEVRVP | (SEQ ID NO: 403) |
| LTYGGLEALG | (SEQ ID NO: 404) |
| VEEYSSSGVS | (SEQ ID NO: 405) |
| VCEVSDSVMA | (SEQ ID NO: 406) |

[0151] TLR2 ligands (e.g., TLR2 agonists) for use in the compositions and methods of the invention can also include at least one member selected from the group consisting of SEQ ID NOS: 455-494 (see, PCT/US 2006/002906/WO 2006/083706; PCT/US 2006/003285/WO 2006/083792; PCT/US 2006/041865; PCT/US 2006/042051).

| | |
|---|---|
| NPPTT | (SEQ ID NO: 455) |
| MRRIL | (SEQ ID NO: 456) |
| MISS | (SEQ ID NO: 457) |
| RGGSK | (SEQ ID NO: 458) |
| RGGF | (SEQ ID NO: 459) |
| NRTVF | (SEQ ID NO: 460) |
| NRFGL | (SEQ ID NO: 461) |
| SRHGR | (SEQ ID NO: 462) |
| IMRHP | (SEQ ID NO: 463) |
| EVCAP | (SEQ ID NO: 464) |
| ACGVY | (SEQ ID NO: 465) |
| CGPKL | (SEQ ID NO: 466) |
| AGCFS | (SEQ ID NO: 467) |
| SGGLF | (SEQ ID NO: 468) |
| AVRLS | (SEQ ID NO: 469) |
| GGKLS | (SEQ ID NO: 470) |
| VSEGV | (SEQ ID NO: 471) |
| KCQSF | (SEQ ID NO: 472) |
| FCGLG | (SEQ ID NO: 473) |
| PESGV | (SEQ ID NO: 474) |
| DPDSG | (SEQ ID NO: 475) |
| IGRFR | (SEQ ID NO: 476) |
| MGTLP | (SEQ ID NO: 477) |
| ADTHQ | (SEQ ID NO: 478) |
| HLLPG | (SEQ ID NO: 479) |
| GPLLH | (SEQ ID NO: 480) |
| NYRRW | (SEQ ID NO: 481) |
| LRQGR | (SEQ ID NO: 482) |
| IMWFP | (SEQ ID NO: 483) |
| RVVAP | (SEQ ID NO: 484) |
| IHVVP | (SEQ ID NO: 485) |
| MFGVP | (SEQ ID NO: 486) |
| CVWLQ | (SEQ ID NO: 487) |
| IYKLA | (SEQ ID NO: 488) |
| KGWF | (SEQ ID NO: 489) |
| KYMPH | (SEQ ID NO: 490) |
| VGKND | (SEQ ID NO: 491) |
| THKPK | (SEQ ID NO: 492) |
| SHIAL | (SEQ ID NO: 493) |
| AWAGT | (SEQ ID NO: 494) |

[0152] The TLR2 ligand (e.g., TLR2 agonist) can also include at least a portion of at least one member selected from the group consisting of flagellin modification protein FlmB of Caulobacter crescentus; Bacterial Type III secretion system protein; invasin protein of Salmonella; Type 4 fimbrial biogenesis protein (PilX) of Pseudomonas, Salmonella SciJ protein; putative integral membrane protein of Streptomyces; membrane protein of Pseudomonas; adhesin of Bordetella pertusis; peptidase B of Vibrio cholerae; virulence sensor protein of Bordetella; putative integral membrane protein of Neisseria meningitidis; fusion of flagellar biosynthesis proteins FliR and FlhB of Clostridium; outer membrane protein (porin) of Acinetobacter; flagellar biosynthesis protein FlhF of Helicobacter; ompA related protein of Xanthomonas; omp2a porin of Brucella; putative porin/fimbrial assembly protein (LHrE) of Salmonella; wbdk of Salmonella; Glycosyltransferase involved in LPS biosynthesis; Salmonella putative permease.

[0153] The TLR2 ligand (e.g., TLR agonist) can include at least a portion of at least one member selected from the group consisting of lipoprotein/lipopeptides (a variety of pathogens); peptidoglycan (Gram-positive bacteria); lipoteichoic acid (Gram-positive bacteria); lipoarabinomannan (mycobacteria); a phenol-soluble modulin (Staphylococcus epidermidis); glycoinositolphospholipids (Trypanosoma Cruzi); glycolipids (Treponema maltophilum); porins (Neisseria); zymosan (fungi) and atypical LPS (Leptospira interrogans and Porphyromonas gingivalis).

[0154] The TLR2 ligand (e.g., TLR2 agonist) can also include at least one member selected from the group consisting of SEQ ID NOS: 495-497 (see, PCT/US 2006/002906/WO 2006/083706; PCT/US 2006/003285/WO 2006/083792; PCT/US 2006/041865; PCT/US 2006/042051).

| | |
|---|---|
| KGGVGPVRRSSRLRRTTQPG | (SEQ ID NO: 495) |
| GRRGLCRGCRTRGRIKQLQSAHK | (SEQ ID NO: 496) |
| RWGYHLRDRKYKGVRSHKGVPR | (SEQ ID NO: 497) |

[0155] The TLR2 agonist can include at least a portion of a bacterial lipoprotein (BLP).

[0156] The TLR2 agonist can be a bacterial lipoprotein, such as Pam2Cys (S-[2,3-bis(palmitoyloxy)propyl]cysteine), Pam3Cys ([Palmitoyl]-Cys((RS)-2,3-di(palmitoyloxy)-propyl cysteine) or Pseudomonas aeruginosa OprI lipoprotein (OprI). Exemplary OprI lipoproteins include SEQ ID NO: 782, encoded by SEQ ID NO: 783. An exemplary E. coli bacterial lipoprotein for use in the invention described herein is SEQ ID NO: 784 encoded by SEQ ID NO: 785. A bacterial lipoprotein that activates a TLR2 signaling pathway (a TLR2 agonist) is a bacterial protein that includes a palmitoleic acid (Omueti, K. O., et al., J. Biol. Chem. 280: 36616-36625 (2005)). For example, expression of SEQ ID NOS: 783 and 785 in bacterial expression systems (e.g., E. coli) results in the addition of a palmitoleic acid moiety to a cysteine residue of the resulting protein (e.g., SEQ ID NOS: 782 and 784) thereby generating a TLR2 agonist for use in the compositions, fusion proteins and polypeptides of the invention. Production of tripalmitoylated-lipoproteins (also referred to as triacyl-lipoproteins) in bacteria occurs through the addition of a diacylglycerol group to the sulfhydryl group of a cysteine (e.g., cysteine 21 of SEQ ID NO: 784) followed by cleavage of the signal sequence and addition of a third acyl chain to the free N-terminal group of the same cysteine (e.g., cysteine 21 of SEQ ID NO: 784) (Sankaran, K., et al., J. Biol. Chem. 269.19706 (1994)), to generate a tripalmitylated peptide (a TLR2 agonist) as shown, for example, in FIG. 74.

[0157] The Toll-like Receptor agonist in the compositions of the invention can further include at least one cysteine residue at the terminal amino acid of the amino-terminus and/or the terminal amino acid of the carboxy-terminus of the Toll-like Receptor agonist. For example, SEQ ID NO: 359 can further include at least one cysteine residue in a peptide bond to the amino-terminal glycine residue and/or at least one cysteine residue in a peptide bond to the carboxy-terminal glycine residue; SEQ ID NO: 360 can further include at least one cysteine residue in a peptide bond to the amino-terminal lysine residue and/or at least one cysteine residue in a peptide bond to the carboxy-terminal glycine residue; SEQ ID NO: 361 can further include at least one cysteine residue in a peptide bond to the amino-terminal glutamic acid residue and/or at least one cysteine residue in a peptide bond to the carboxy-terminal proline residue.

[0158] TLR5 agonists for use in the methods of the invention can include at least a portion of a flagellin. Flagellin are pathogen-associated molecular patterns (PAMPs) that activate TLR5.

[0159] The flagellin in the compositions and methods described herein can be at least a portion of a S. typhimurium flagellin (Genbank Accession Number AF045151); at least a portion of the S. typhimurium flagellin selected from the group consisting of SEQ ID NO: 498, SEQ ID NO: 812, SEQ ID NO: 816 and SEQ ID NO: 500; at least a portion of an S. muenchen flagellin (Genbank Accession Number AB028476) that includes at least a portion of SEQ ID NO: 504 and SEQ ID NO: 813; at least a portion of P. aeruginosa flagellin that includes at least a portion of SEQ ID NO: 815; at least a portion of a Listeria monocytogenes flagellin that includes at least a portion of SEQ ID NO: 820; at least a portion of an E. coli flagellin that includes at least a portion of SEQ ID NO: 502 and SEQ ID NO: 814; at least a portion of a Yersinia flagellin; and at least a portion of a Campylobacter flagellin.

[0160] The flagellin employed in the compositions of the invention can also include the polypeptides of SEQ ID NO: 498, SEQ ID NO: 500, SEQ ID NO: 504 and SEQ ID NO: 502; at least a portion of SEQ ID NO: 498, at least a portion of SEQ ID NO: 500, at least a portion of SEQ ID NO: 504 and at least a portion of SEQ ID NO: 502; and a polypeptide encoded by SEQ ID NO: 499, SEQ ID NO: 501, SEQ ID NO: 505 and SEQ ID NO: 503; or at least a portion of a polypeptide encoded by SEQ ID NO: 499, SEQ ID NO: 501, SEQ ID NO: 505 and SEQ ID NO: 503.

[0161] The flagellin employed in the compositions and method of the invention can lack at least a portion of a hinge region. Hinge regions are the hypervariable regions of a flagellin. Hinge regions of a flagellin are also referred to herein as “D3 domain or region,” “propellor domain or region,” “hypervariable domain or region” and “variable domain or region.” “Lack” of a hinge region of a flagellin, means that at least one amino acid or at least one nucleic acid codon encoding at least one amino acid that comprises the hinge region of a flagellin is absent in the flagellin. Examples of hinge regions include amino acids 176-415 of SEQ ID NO: 498, which are encoded by nucleic acids 528-1245 of SEQ ID NO: 499; amino acids 174-422 of SEQ ID NO: 502, which are encoded by nucleic acids 522-1266 of SEQ ID NO: 503; or amino acids 173-464 of SEQ ID NO: 504, which are encoded by nucleic acids 519-1392 of SEQ ID NO: 505. Thus, if amino acids 176-415 were absent from the flagellin of SEQ ID NO: 498, the flagellin would lack a hinge region. A flagellin lacking at least a portion of a hinge region is also referred to herein as a “truncated version” of a flagellin.

[0162] “At least a portion of a hinge region,” as used herein, refers to any part of the hinge region of the flagellin, or the entirety of the hinge region. “At least a portion of a hinge region” is also referred to herein as a “fragment of a hinge region.” At least a portion of the hinge region of fljB/STF2 can be, for example, amino acids 200-300 of SEQ ID NO: 498. Thus, if amino acids 200-300 were absent from SEQ ID NO: 498, the resulting amino acid sequence of STF2 would lack at least a portion of a hinge region.

[0163] Alternatively, at least a portion of a naturally occurring flagellin can be replaced with at least a portion of an artificial hinge region. “Naturally occurring,” in reference to a flagellin amino acid sequence, means the amino acid sequence present in the native flagellin (e.g., S. typhimurium flagellin, S. muenchin flagellin, E. coli flagellin). The naturally occurring hinge region is the hinge region that is present in the native flagellin. For example, amino acids 176-415 of SEQ ID NO: 498, amino acids 174-422 of SEQ ID NO: 502 and amino acids 173-464 of SEQ ID NO: 504, are the amino acids corresponding to the natural hinge region of STF2, E. coli fliC and S. muenchen flagellins, fliC, respectively. “Artificial,” as used herein in reference to a hinge region of a flagellin, means a hinge region that is inserted in the native flagellin in any region of the flagellin that contains or contained the native hinge region.

[0164] The hinge region of a flagellin be deleted and replaced with an antigen (e.g., HA1-1, HA1-2, the maturational cleavage site) and the resulting construct fused to another antigen (e.g., 4×M2e).

[0165] An artificial hinge region may be employed in a flagellin that lacks at least a portion of a hinge region, which may facilitate interaction of the carboxy- and amino-terminus of the flagellin for binding to TLR5 and, thus, activation of the TLR5 innate signal transduction pathway. A flagellin lacking at least a portion of a hinge region is designated by the name of the flagellin followed by a “Δ.” For example, an STF2 (e.g., SEQ ID NO: 498) that lacks at least a portion of a hinge region is referenced to as “STF2Δ” or “fljB/STF2Δ” (e.g., SEQ ID NO: 500).

[0166] The flagellin for use in the methods and compositions of the invention can be a at least a portion of a flagellin, wherein the flagellin component includes at least one cysteine residue and whereby the flagellin component activates a Toll-like Receptor 5; a flagellin component that is at least a portion of a flagellin, wherein at least one lysine of the flagellin component has been substituted with at least one arginine, whereby the flagellin component activates a Toll-like Receptor 5; a flagellin component that is at least a portion of a flagellin, wherein at least one lysine of the flagellin component has been substituted with at least one serine residue, whereby the flagellin component activates a Toll-like Receptor 5; a flagellin component that is at least a portion of a flagellin, wherein at least one lysine of the flagellin component has been substituted with at least one histidine residue, whereby the flagellin component activates a Toll-like Receptor 5, as described herein.

[0167] A recombinant fusion protein can be generated by operably linking a TLR agonist to the protein portion (e.g., HA1-1, HA1-2).

[0168] “Fusion protein,” as used herein, refers to a protein generated from at least two similar or distinct components (e.g., a protein portion of HA and a TLR agonist). Fusion proteins can be generated recombinantly or by chemical conjugation.

[0169] In an embodiment, fusion proteins of protein portions of HA and TLR agonists (e.g., SEQ ID NOS: 89-92, 95, 151-160, 177, 209, 210 and 211) can be admixed or coadministered with fusion proteins of TLR agonists and M2e proteins (e.g., SEQ ID NOS: 528, 587, 589 and 591) and administered to a subject to stimulate an immune response, such as a protective immune response.

[0170] Fusion proteins of the invention can be designated by components of the fusion proteins separated by a “.”. For example, “STF2.HA1-2” refers to a fusion protein comprising one STF2 protein and one HA1-2 protein; and “STF2Δ.HA1-2” refers to a fusion protein comprising one STF2 protein without the hinge region and HA1-2. Exemplary fusion proteins of the invention include SEQ ID NOS: 89-92, 95, 151-160, 177, 209, 210 and 211.

[0171] The fusion proteins can include, for example, two, three, four, five, six or more Toll-like Receptor agonists (e.g., flagellin) and two, three, four, five, six or more antigens (e.g., protein portions, such as HA1-1, HA1-2). When two or more TLR agonists and/or two or more protein portions comprise fusion proteins of the invention, they are also referred to as “multimers.” For example, a multimer of HA1-1 can be four HA1-1 sequences, which is referred to herein as 4×HA1-1. Likewise, “2×HA1-1” is a multimer of two HA1-1 sequences. (See, for example, SEQ ID NOS: 342-346 and 348).

[0172] The fusion proteins of the invention can further include a linker between at least one component of the fusion protein (e.g., TLR agonist) and at least one other component of the fusion protein (e.g., HA1-1, HA1-2) of the composition, a linker between at least two of similar components of the fusion protein (e.g., HA1-1, HA1-2) or any combination thereof. “Linker,” as used herein in reference to a fusion protein of the invention, refers to a connector between components of the fusion protein in a manner that the components of the fusion protein are not directly joined. For example, one part of the fusion protein (e.g., flagellin) can be linked to a distinct part (e.g., protein portion, HA1-1, HA1-2, an antigen) of the fusion protein. Likewise, at least two or more similar or like components of the fusion protein can be linked (e.g., two flagellin can further include a linker between each flagellin, or two HA proteins can further include a linker between each HA protein).

[0173] Additionally, or alternatively, the fusion proteins of the invention can include a combination of a linker between distinct components of the fusion protein and similar or like components of the fusion protein. For example, a fusion protein can comprise at least two TLR agonists that further includes a linker between, for example, two or more flagellin; at least two protein portions of HA that further include a linker between them; a linker between one component of the fusion protein (e.g., flagellin) and another distinct component of the fusion protein (e.g., protein portions of HA), or any combination thereof.

[0174] The linker can be an amino acid linker. The amino acid linker can include synthetic or naturally occurring amino acid residues. The amino acid linker employed in the fusion proteins of the invention can include at least one member selected from the group consisting of a lysine residue, a glutamic acid residue, a serine residue and an arginine residue. The amino acid linker can include, for example, SEQ ID NOS: 521, 523, 524 and 526, encoded by the nucleic acid sequences of SEQ ID NOS: 520, 522, 525 and 527 respectively.

[0175] The Toll-like Receptor agonist of the fusion proteins of the invention can be fused to a carboxy-terminus, the amino-terminus or both the carboxy- and amino-terminus of the protein portion of HA (e.g., HA1-1, HA1-2 or other antigens, such as the ectodomain of the Matrix 2 protein, a maturational cleavage site).

[0176] Fusion proteins can be generated by fusing the protein portions of HA (or other antigens, such as the maturational cleavage site of HA) to at least one of four regions (Regions 1, 2, 3 and 4) of flagellin, which have been identified based on the crystal structure of flagellin (PDB:1UCU) (see FIG. 77).

[0177] Region 1 is TIAL (SEQ ID NO: 823) . . . - . . . GLG (95-111 of SEQ ID NO: 841). The corresponding residues for Salmonella typhimurium fljB construct are TTLD (SEQ ID NO: 824) . . . - . . . GTN (196-216 of SEQ ID NO: 841). This region is an extended peptide sitting in a groove of two beta strands (GTDQKID (SEQ ID NO: 825) and NGEVTL (SEQ ID NO: 826) of (SEQ ID NO: 841). Substitution of this peptide with an antigen (e.g., HA maturational cleavage site) may mimic the conformation of wild type maturational cleavage site peptide in HA0. Exemplary amino acids that may be substituted include: flagellin residues SGLDDAAIKAAT (SEQ ID NO: 827) (201-212 of SEQ ID NO: 841) substituted with maturational cleavage site residues: RGIFGAIAGFIE (SEQ ID NO: 828), which correspond to the A/H3N2 subtype, or RGLFGAIAGFIE (SEQ ID NO: 803), which correspond to the maturational cleavage site residues from the A/H2N1, A/H1N1, A/H5N1 subtypes or with RGFFGAIAGFLE (SEQ ID NO: 805), which correspond to Influenza B HA maturational cleavage site residues.

[0178] Region 2 of the Salmonella flagellin is a small loop GTG (238-240 of SEQ ID NO: 841) in 1UCU structure (see FIG. 77). The corresponding loop in Salmonella fljB is GADAA (SEQ ID NO: 829) (244-248 of SEQ ID NO: 841). Insertion of an antigen (e.g., protein portions of HA, a maturation cleavage site peptide) in this loop or replacement of the entire loop with an antigen (e.g., protein portions of HA, a maturational cleavage site peptide) should preserve the extended loop structure of the maturational cleavage site peptide that is associated with the native HA molecule.

[0179] Region 3 is a bigger loop that resides on the opposite side of the Region 1 peptide (see FIG. 77). This loop can be simultaneously substituted together with region 1 to create a double copy of the antigen (e.g., protein portions of HA, a maturational cleavage site peptide). The loop starts from AGGA (SEQ ID NO: 830) and ends at PATA (SEQ ID NO: 831) (259-274 of SEQ ID NO: 841). The corresponding Salmonella fljB sequence is AAGA (SEQ ID NO: 832 . . . - . . . ATTK (SEQ ID NO: 833) (266-281 of SEQ ID NO: 841). The sequence AGATKTTMPAGA (SEQ ID NO: 834) (267-278 of SEQ ID NO: 841) can be replaced with the antigens (e.g., protein portions of HA, a maturation cleavage site peptides).

[0180] Region 4 is the loop (VTGTG (SEQ ID NO: 835)) connecting a short α-helix (TEAKAALTAA (SEQ ID NO: 836)) and a β-strand (ASVVKMSYTDN (SEQ ID NO: 837) in 1UCU structure (see FIG. 77). The corresponding loop in Salmonella fljB is a longer loop VDATDANGA (SEQ ID NO: 838 (307-315 of SEQ ID NO: 841). An antigen (e.g., a protein portion of HA, a maturation cleavage site peptide) can be inserted into or replace this region.

[0181] One or more copies of antigens (e.g., maturation cleavage site) can be inserted or used to replace the peptides listed in the above four regions. Preferably, the replacements would be in Region 1 and Region 3.

[0182] Exemplary sequences of maturation cleavage site peptides of HA are listed below:

| | |
|---|---|
| Sequence | Subtype |

| | | |
|---|---|---|
| NVPEKQTRGIFGAIAGFIE | A/H3N2 | (SEQ ID NO: 800) |
| NVPQIESRGLFGAIAGFIE | A/H2N1 | (SEQ ID NO: 801) |
| NIPSIQSRGLFGAIAGFIE | A/H1N1 | (SEQ ID NO: 802) |
| RERRRKKRGLFGAIAGFIE | A/H5N1 | (SEQ ID NO: 839) |
| PAKLLKERGFFGAIAGFLE | B/HA | (SEQ ID NO: 804) |

Sequence alignment of X-ray model (1UCU) and SEQ ID NO: 841
75.1% identity in 506 residues overlap; Score: 1703.0;
Gap frequency: 2.6%

| | | |
|---|---|---|
| 1UCU | 1 | AQVINTNSLSLLTQNNLNKSQSALGTAIERLSSGLRINSAKDDAAGQAIANRFTANIKGL |
| Sfla | 2 | AQVINTNSLSLLTQNNLNKSQSALGTAIERLSSGLRINSAKDDAAGQAIANRFTANIKGL |
| | | ************************************************************ |
| 1UCU | 61 | TQASRNANDGISIAQTTEGALNEINNNLQRVRELAVQSANSTNSQSDLDSIQAEITQRLN |
| Sfla | 62 | TQASRNANDGISIAQTTEGALNEINNNLQRVRELAVQSANSTNSQSDLDSIQAEITQRLN |
| | | ************************************************************ |
| 1UCU | 121 | EIDRVSGQTQFNGVKVLAQDNTLTIQVGANDGETIDIDLKQINSQTLGLDTLNVQQKYKV |
| Sfla | 122 | EIDRVSGQTQFNGVKVLAQDNTLTIQVGANDGETIDIDLKQINSQTLGLDSLNVQKAYDV |
| | | ************************************************************ |
| 1UCU | 181 | SDTAATVTGYAD--TTI---ALDNSTFKASATGLGGTDQKIDGDLKFDDTTGKYYAKVTV |
| Sfla | 182 | KDTAVTTKAYANNGTTLDVSGLDDAAIKAATGGTNGTASVTGGAVKFDADNNKYFVTIGG |
| | | *** * ** ** ** ** * ** * *** ** |
| 1UCU | 236 | TGGT-GKDGYYEVSVDKTNGEVTLAGGATSPLTGGLPATATEDVKNVQVANADLTEAKA |
| Sfla | 242 | FTGADAAKNGDYEVNV-ATDGTVTLAAGATKTTMPAGATTKTEVQELKDTPAVVSALAKN |
| | | * * * *** * * * **** *** * ** ** |
| 1UCU | 294 | ALTAAGVTGT----ASVVKMSYTDNNGKTIDGGLAVKVGDDYYSATQNK-DGSISINTTK |
| Sfla | 301 | ALIAGGVDATDANGAELVKMSYTDKNGKTIEGGYALKAGDKYYAADYDEATGAIKAKTTS |
| | | ** * ** * * ******* ***** ** * * ** ** * * * ** |
| 1UCU | 349 | YTADDGTSKTALNKIGGADGKTEVVSIGGKTYAASKAEGHNFKAQPDLAEAAATTTENPL |
| Sfla | 361 | YTAADGTTKTAANQLGGVDGKTEVVTIDGKTYNASKAAGHDFKAQPELAEAAAKTTENPL |
| | | *** *** *** * *** ******* * **** **** ** ***** ****** ****** |
| 1UCU | 409 | QKIDAALAQVDTLRSDLGAVQNRFNSAITNLGNTVNNLTSVRSRIEDSDYATEVSNMSRA |
| Sfla | 421 | QKIDAALAQVDALRSDLGAVQNRFNSAITNLGNTVNNLSEARSRIEDSDYATEVSNMSRA |
| | | *********** ************************** ******************* |
| 1UCU | 469 | QILQQAGTSVLAQANQVPQNVLSLLR (SEQ ID NO: 840) |
| Sfla | 481 | QILQQAGTSVLAQANQVPQNVLSLLR (SEQ ID NO: 841) |
| | | ************************** |

[0183] The methods of making a protein that stimulates a protective immune response in a subject can further include the step of operably linking a nucleic acid sequence encoding a carrier protein to the nucleic acid sequence encoding a portion of the viral hemagglutinin.

[0184] “Carrier,” as used herein, refers to a molecule (e.g., protein, peptide) that can enhance stimulation of a protective immune response. Carriers can be physically attached (e.g., linked by recombinant technology, peptide synthesis, chemical conjugation or chemical reaction) to a composition (e.g., a protein portion of a naturally occurring viral hemagglutinin) or admixed with the composition.

[0185] Carriers for use in the methods and compositions described herein can include, for example, at least one member selected from the group consisting of Tetanus toxoid (TT), Vibrio cholerae toxoid, Diphtheria toxoid (DT), a cross-reactive mutant (CRM) of diphtheria toxoid, E. coli enterotoxin, E. coli B subunit of heat labile enterotoxin (LTB), Tobacco mosaic virus (TMV) coat protein, protein Rabies virus (RV) envelope protein (glycoprotein), thyroglobulin (Thy), heat shock protein HSP 60 Kda, Keyhole limpet hemocyamin (KLH), an early secreted antigen tuberculosis-6 (ESAT-6), exotoxin A, choleragenoid, hepatitis B core antigen, and the outer membrane protein complex of N. meningiditis (OMPC) (see, for example, Schneerson, R., et al., Prog Clin Biol Res 47:77-94 (1980); Schneerson, R., et al., J Exp Med 152:361-76 (1980); Chu, C., et al., Infect Immun 40: 245-56 (1983); Anderson, P., Infect Immun 39:233-238 (1983); Anderson, P., et al., J Clin Invest 76:52-59 (1985); Fenwick, B. W., et al., 54:583-586 (1986); Que, J. U., et al. Infect Immun 56:2645-9 (1988); Que, J. U., et al. Infect Immun 56:2645-9 (1988); (Que, J. U., et al. Infect Immun 56:2645-9 (1988); Murray, K., et al., Biol Chem 380:277-283 (1999); Fingerut, E., et al., Vet Immunol Immunopathol 112:253-263 (2006); and Granoff, D. M., et al., Vaccine 11:Suppl 1:S46-51 (1993)).

[0186] Exemplary carrier proteins for use in the methods and compositions described herein can include at least one member selected from the group consisting of SEQ ID NOS: 788-795:

Cross-reactive mutant (CRM) of diphtheria toxin
including, CRM197

(SEQ ID NO: 788)

GADDVVDSSKSFVMENFSSYHGTKPGYVDSIQKGIQKPKSGTQGNYDDDW
KGFYSTDNKYDAAGYSVDNENPLSGKAGGVVKVTYPGLTKVLALKVDNAE
TIKKELGLSLTEPLMEQVGTEEFIKRFGDGASRVVLSLPFAEGSSSVEYT
NNWEQAKALSVELETNFETRGKRGQDAMYEYMAQACAGNRVRRSVGSSLS
CIINLDWDVIRDKTKTKIESLKEHGPIKNKMSESPNKTVSEEKAKQYLEE
FHQTALEHPELSELKTVTGTNPVFAGANYAAWAVNVAQVIDSETADNLEK
TTAALSILPGIGSVMGIADGAVHHNTEEIVAQSIALSSLMVAQAIPLVGE
LVDIGFAAYNFVEsIINLFQVVHNSYNRPAYSPGHKTQPFLHDGYAVSWN
TVEDSIIRTGFQGESGHDIKITAENTPLPIAGVLLPTIPGKLDVNKSKTH
ISVNGRIDRMRCPAIDGDVTFCPYKSPVYVGNGVHANLHVAFHRSSSEKI
HSNEISSDSIGVLGYQKTVDHTKVNSKLSLFFEIKS
Coat protein of Tobacco mosaic virus (TMV)
coat protein

(SEQ ID NO: 789)

MMAYSIPTPSQLVYFTENYADYIPFVNRLINARSNSFQTQSGRDELREIL
IKSQVSVVSPISRFPAEPAYYIYLRDPSISTVYTALLQSTDTRNRVIEVE
NSTNVTTAEQLNAVRRTDDASTAIHNNLEQLLSLLTNGTGVFNRTSFESA
SGLTWLVTTTPRTA
Coat protein of alfalfa mosaic virus (AMV)

(SEQ ID NO: 790)

MSSSQKKAGGKAGKPTKRSQNYAALRKAQLPKPPALKVPVAKPTNTILPQ
TGCVWQSLGTPLSLSSSNGLGARFLYSFLKDFAAPRILEEDLIFRMVFSI
TPSHAGSFCLTDDVTTEDGRAVAHGNPMQEFPHGAFHANEKYGFELVFTA
YTHAGMQNQNFKHSYAVALCLDFDALPEGSRNPSYRTNEVWVERKAYPPA
GPLRSLITVGLFDDADDLDRQ
Coat protein of Potato virus X

(SEQ ID NO: 791)

MTTPANTTQATGSTTSTTTKTAGATPATTSGLFTIPDGEFFSTAPAIVAS
NAVATNEDLSKIEAIWKDMKVPTDTMAQAAWDLVRHCADVGSSAQTEMID
TGPYSNGISRARLAAAIKEVCTLRQFCMKYAPVVWNWMLTNNSPPANWQA
QGFKPEHKFAAFDFFNGVTPNPAAIMPKEGLIRPPSEAEMNAAQTAAFVK
ITKARAQSNDFASLDAAVTRGRITGTTTAEAVVTLPPP
Porins from Neisseria sp, e.g., class I outer
membrane protein of Neisseria meningitides

(SEQ ID NO: 792)

MRKKLTALVLSALPLAAVADVSLYGEIKAGVEGRNYQLQLTEAQAANGGA
SGQVKVTKVTKAKSRIRTKISDFGSFIGFKGSEDLGEGLKAVWQLEQDVS
VAGGGATQWGNRESFIGLAGEFGTLRAGRVANQFDDASQAIDPWDSNNDV
ASQLGIFKRFIDDMPVSVRYDSPEFSGFSGSVQFVPAQNSKSAYKPAYWT
TVNTGSATTTTFVPAVVGKPGSDVYYAGLNYKIIGGFAGNYAFKYAAUIA
NVGRDAFELFLLGSGSDQAKGTDPLKNHQNHQVHRLTGGYEEGGLNLALA
AQLDLSENGDKTKNSTTEIAATASYRFGNAVPRISYAHGFDFIERGKKGE
NTSYDQIIAGVDYDFSKRTSAIVSGAWLKRNTGIGNYTQINAASVGLRHK
F
Major fimbrial subunit protein type I (Fimbrillin)

(SEQ ID NO: 793)

MVLKTSNSNRAFGVGDDESKVAKLTVMVYNGEQQEAIKSAENATKVEDIK
CSAGQRTLVVMANTGAMELVGKTLAEVKALTTELTAENQEAAGLIMTAEP
KTIVLKAGKNYIGYSGTGEGNHIENDPLKIKRVHARMAFTEIKVQMSAAY
DNIYTFVPEKIYGLIAKKQSNLFGATLVNADANYLTGSLTTFNGAYTPAN
YANVPWLSRNYVAPAADAPQGFYVLENDYSANGGTIHPTILCVYGKIQKN
GADLAGADLAAAQAANWVDAEGKTYYPVLVNFNSNNYTYDSNYTPKIERN
HKYDIKLTITGPGTNNPENPITESAHLNVQCTVAEWVLVGQNATW
Mycoplasma fermentans macrophage activating
lipopeptide (MALP-2)

(SEQ ID NO: 794)

MKKSKKILLGLSPIAAVLPAVAVSCGNNDESNISFKEKDISKYTTTNANG
KQVVKNAELLKLKPVLITDEGKIDDKSFNQSAFEALKMNKQTGIEINSVE
PSSNFESAYNSALSAGHKIWVLNGFKHQQSIKQYIDAHREELERNQIKII
GIDFDIETEYKWFYSLQFNIKESAFTTGYAIASWLSEQDESKRVVASFGV
GAFPGVTTFNEGFAKGILYYNQKHKSSKIYHTSPVKLDSGFTAGEKMNTV
INNVLSSTPADVKYNPHVILSVAGPATFETVRLANKGQYVIGVDSDQGMI
QDKDRILTSVLKHIKQAVYETLLDLILEKEEGYKPYVVKDKKADKKWSHF
GTQKEKWIGVAENHFSNTEEQAKINNKIKEAIKMFRELPEDFVKYINSDK
ALKDGNKIDNVSERIEAIISATNKAAK
p19 protein of Mycobacterium tuberculosis

(SEQ ID NO: 795)

ATTLPVQRHPRSLFPEFSELFAAFPSFAGLRPTFDTRLMRIEDEMKEGRY
EVRAELPGVDPDKDVDIMVRDGQLTIKAERTEQKDFDGRSEFAYGSFVRT
VSLPVGADEDDIKATYDKGILTVSVAVSEGKPTEKIHIQIRSTN

[0187] The compositions of the invention can further include at least one adjuvant. Adjuvants contain agents that can enhance the immune response against substances that are poorly immunogenic on their own (see, for example, Immunology Methods Manual, vol. 2, I. Lefkovits, ed., Academic Press, San Diego, Calif., 1997, ch. 13). Immunology Methods Manual is available as a four volume set, (Product Code Z37,435-0); on CD-ROM, (Product Code Z37,436-9); or both, (Product Code Z37,437-7). Adjuvants can be, for example, mixtures of natural or synthetic compounds that, when administered with compositions of the invention, such as proteins that stimulate a protective immune response made by the methods described herein, further enhance the immune response to the protein. Compositions that further include adjuvants may further increase the protective immune response stimulated by compositions of the invention by, for example, stimulating a cellular and/or a humoral response (i.e., protection from disease versus antibody production). Adjuvants can act by enhancing protein uptake and localization, extend or prolong protein release, macrophage activation, and T and B cell stimulation. Adjuvants for use in the methods and compositions described herein can be mineral salts, oil emulsions, mycobacterial products, saponins, synthetic products and cytokines. Adjuvants can be physically attached (e.g., linked by recombinant technology, by peptide synthesis or chemical reaction) to a composition described herein or admixed with the compositions described herein.

[0188] In another embodiment, the invention is a method of making a protein that stimulates a protective immune response in a subject, comprising the steps of separating a portion of a protein from a naturally occurring viral hemagglutinin to thereby form a protein portion, wherein the protein portion includes at least a portion of a globular head and at least a portion of at least one secondary structure that causes the globular head to essentially retain its tertiary structure, and wherein the protein portion lacks a membrane fusion domain, a transmembrane domain and a cytoplasmic domain; transfecting a nucleic acid sequence encoding the protein portion into a eukaryotic host cell, wherein the eukaryotic host cell is not a Pichia pastoris eukaryotic host cell; and culturing the eukaryotic host cell to thereby make the protein. In one embodiment, the protein portion can further lack a signal sequence. In another embodiment, the protein portion can further include a sialic acid binding site.

[0189] In a further embodiment, the invention is a method of making a protein that stimulates a protective immune response in a subject, comprising the steps of separating a portion of a protein from a naturally occurring viral hemagglutinin to thereby form a protein portion, wherein the protein portion includes at least a portion of a globular head, and at least a portion of at least one secondary structure that causes the globular head to essentially retain its tertiary structure, and wherein the protein portion lacks a membrane fusion domain, a transmembrane domain and a cytoplasmic domain; transfecting a nucleic acid sequence encoding the protein portion into a eukaryotic host cell, wherein the eukaryotic host cell is not an insect eukaryotic host cell; and culturing the eukaryotic host cell to thereby make the protein that stimulates a protective immune response in a subject.

[0190] In a further embodiment, the invention is a method of making a protein that stimulates a protective immune response in a subject, comprising the steps of separating a portion of a protein from a naturally occurring viral hemagglutinin to thereby form a protein portion, wherein the protein portion includes at least a portion of a globular head, and at least a portion of at least one secondary structure that causes the globular head to essentially retain its tertiary structure, and wherein the protein portion lacks a membrane fusion domain, a transmembrane domain and a cytoplasmic domain; transfecting a nucleic acid sequence encoding the protein portion into a eukaryotic host cell, wherein the eukaryotic host cell is not a stably transformed insect cell; and culturing the eukaryotic host cell to thereby make the protein that stimulates a protective immune response in a subject.

[0191] In another embodiment, the invention is a method of making a protein that stimulates a protective immune response in a subject, comprising the steps of separating a portion of a protein from a naturally occurring viral hemagglutinin to thereby make a protein portion, wherein the protein portion includes at least a portion of a globular head and at least a portion of at least one secondary structure that causes the globular head to essentially retain its tertiary structure, and wherein the protein portion lacks a membrane fusion domain, a transmembrane domain and a cytoplasmic domain; infecting a nucleic acid sequence encoding the protein portion into an insect cell host cell (e.g., a baculovirus insect host cell, such as Sf9 or High5 cells); and culturing the insect host cell to thereby make the protein that stimulates a protective immune response in a subject.

[0192] The methods of making a protein that stimulates a protective immune response in a subject can further include the step of deleting at least one glycosylation site in the nucleic acid sequence encoding the protein portion. The glycosylation site that is deleted can include an N-glycosylation site.

[0193] The eukaryotic host cells employed in the methods of the invention can include a Saccharomyces eukaryotic host cell, an insect eukaryotic host cell (e.g., at least one member selected from the group consisting of a Baculovirus infected insect cell, such as Spodoptera frugiperda (Sf9) or Trichhoplusia ni (High5) cells; and a Drosophila insect cell, such as Dme12 cells), a fungal eukaryotic host cell, a parasite eukaryotic host cell (e.g., a Leishmania tarentolae eukaryotic host cell), CHO cells, yeast cells (e.g., Pichia) and a Kluyveromyces lactis host cell.

[0194] Suitable eukaryotic host cells and vectors can also include plant cells (e.g., tomato; chloroplast; mono- and dicotyledonous plant cells; Arabidopsis thaliana; Hordeum vulgare; Zea mays; potato, such as Solanum tuberosum; carrot, such as Daucus carota L.; and tobacco, such as Nicotiana tabacum, Nicotiana benthamiana (Gils, M., et al., Plant Biotechnol J. 3:613-20 (2005); He, D. M., et al., Colloids Surf B Biointerfaces, (2006); Huang, Z., et al., Vaccine 19:2163-71 (2001); Khandelwal, A., et al., Virology. 308:207-15 (2003); Marquet-Blouin, E., et al., Plant Mol Biol 51:459-69 (2003); Sudarshana, M. R., et al. Plant Biotechnol J. 4:551-9 (2006); Varsani, A., et al., Virus Res, 120:91-6 (2006); Kamarajugadda S., et al., Expert Rev Vaccines 5:839-49 (2006); Koya V, et al., Infect Immun. 73:8266-74 (2005); Zhang, X., et al., Plant Biotechnol J. 4:419-32 (2006)).

[0195] The proteins made by the methods of the invention and the compositions of the invention can be purified and characterized employing well-known methods (e.g., gel chromatography, cation exchange chromatography, SDS-PAGE), as described herein.

[0196] For large scale production, fermentation techniques can be employed, as described herein. Additional exemplary fermentation techniques can include a proposed cycle that can start with a culture inoculated into 6 L of MRBR media, as described herein, held at about 30° C., about pH 7, and D0 controlled to greater than about 30%. A 6 liter feed can then be started at least about 30 minutes after glucose exhaustion. The proposed 6 liter feed media, when combined with 6 L of MRBR media, can provide the necessary conditions for E. coli growth based on about 52% utilization of carbon for growth. The feed may or may not include IPTG. The batch can be induced with at least 2 mM IPTG, introduced as a bolus, shortly after the feed is started to initiate production. The feed rate can start at about 20 mL feed per hour per liter bioreactor volume and increase over time based on the ability of the culture to accept more glucose without glucose accumulation. The culture can be harvested when the feed is complete. The 6 liter feed media, about pH 6.0, can include Glucose 180 g/L; KH₂PO₄ 2 g/L; NaH₂PO₄ (H₂O) 4 g/L; (NH₄)₂HPO₄ 12 g/L; (NH₄)₂HSO₄ 4 g/L; DL-Alanine 40 g/L; Citric Acid 4 g/L; MgSO₄(7H₂0) 5.5 g/L; Trace Metals 6 mL; CaCl₂ 2.5 g/L; FeSO₄ 7H₂O 1 g/L.

[0197] Cell disruption and clarification in a large scale production can include removal of Triton X-100 from the resuspension buffer; dissolution of insolubles by the addition of 50 mM Tris, 25 mM NaCl, 8 M urea, about pH 8 to the lysate; addition of PEI (poly ethylamine) and subsequent removal by centrifugation with one or more of the buffers to remove nucleic acids and/or aid in filtration; the addition of flocullants, such as Aerosil 380, Aerosil 200, Alkoxide Alu C, and Celpur; and subsequent removal by centrifugation to aid in filtration. Cation exchange chromatography can include the use of a process resin, adding a denaturing endotoxin removal step containing up to 8 M urea and up to about 2% Triton X-100, and a step gradient elution. The step elution gradient can include about 100 to about 200 mM NaCl.

[0198] In yet another embodiment, the invention is a method of stimulating protective immunity in a subject, comprising the step of administering to the subject a composition that includes a protein made by a method comprising the steps of separating a portion of a protein from a naturally occurring viral hemagglutinin to thereby form a protein portion, wherein the protein portion includes at least a portion of a globular head and at least a portion of at least one secondary structure that causes the globular head to essentially retain its tertiary structure, and wherein the protein portion lacks a membrane fusion domain, a transmembrane domain and a cytoplasmic domain; transforming a nucleic acid sequence encoding the portion into a prokaryotic host cell; and culturing the prokaryotic host cell to thereby make the protein that stimulates protective immunity in a subject.

[0199] In still another embodiment, the invention is a method of stimulating protective immunity in a subject, comprising the step of administering to the subject a composition that includes a protein portion of a naturally occurring viral hemagglutinin, wherein the protein portion includes at least a portion of a globular head and at least a portion of one secondary structure that causes the globular head to essentially retain its tertiary structure and wherein the protein portion lacks a membrane fusion domain, a transmembrane domain and a cytoplasmic domain.

[0200] In a further embodiment, the invention is a method of making a viral hemagglutinin protein that stimulates a protective immune response in a subject, comprising the steps of separating a portion of a protein from a naturally occurring viral hemagglutinin to thereby make a protein portion, wherein the protein portion includes at least a portion of a globular head and at least a portion of at least one secondary structure that causes the globular head to essentially retain its tertiary structure, and wherein the protein portion lacks a membrane fusion domain, a transmembrane domain and a cytoplasmic domain; transfecting a nucleic acid sequence encoding the portion in a eukaryotic host cell, wherein the eukaryotic host cell is not a Pichia pastoris eukaryotic host cell; and culturing the eukaryotic host cell to thereby make the protein that stimulates a protective immune response in a subject.

[0201] In yet another embodiment, the invention is a method of making a viral hemagglutinin protein that stimulates a protective immune response in a subject, comprising the steps of separating a portion of a protein from a naturally occurring viral hemagglutinin to thereby make a protein portion, wherein the protein portion includes at least a portion of a globular head and at least a portion of at least one secondary structure that causes the globular head to essentially retain its tertiary structure, and wherein the protein portion lacks a membrane fusion domain, a transmembrane domain and a cytoplasmic domain; transfecting a nucleic acid sequence encoding the portion in a eukaryotic host cell, wherein the eukaryotic host cell is not a Drosophila melanogaster eukaryotic host cell; and culturing the eukaryotic host cell to thereby make the protein that stimulates a protective immune response in a subject.

[0202] In still another embodiment, the invention is a method of making a viral hemagglutinin protein that stimulates a protective immune response in a subject, comprising the steps of transforming a prokaryotic host cell with a nucleic acid sequence encoding at least one viral hemagglutinin that lacks a transmembrane domain and a cytoplasmic domain; and culturing the prokaryotic cell to thereby make the protein that stimulates a protective immune response in a subject.

[0203] An additional embodiment of the invention is a method of stimulating protective immunity in a subject, comprising the step of administering to the subject a composition that includes a protein made by a method comprising the steps of transforming a prokaryotic host cell with a nucleic acid sequence encoding at least one viral hemagglutinin that lacks a transmembrane domain and a cytoplasmic domain; and culturing the prokaryotic host cell to thereby make the protein that stimulates a protective immune response in a subject.

[0204] In another embodiment, the invention is a method of stimulating protective immunity in a subject, comprising the step of administering to the subject a composition that includes a protein having at least one viral hemagglutinin that lacks a transmembrane domain and a cytoplasmic domain, wherein the protein was expressed in a prokaryotic cell.

[0205] In still another embodiment, the invention is a composition comprising at least a portion of at least one pathogen-associated molecular pattern and a protein portion of a naturally occurring viral hemagglutinin, wherein the protein portion of the naturally occurring viral hemagglutinin includes at least a portion of a globular head and at least a portion of at least one secondary structure that causes the globular head to essentially retain its tertiary structure, and wherein the protein portion of the naturally occurring viral hemagglutinin lacks a membrane fusion domain, a transmembrane domain, and a cytoplasmic domain.

[0206] Pathogen-associated molecular patterns (PAMPs), such as a flagellin or a bacterial lipoprotein, refer to a class of molecules (e.g., protein, peptide, carbohydrate, lipid, lipopeptide, nucleic acid) found in microorganisms that, when bound to a pattern recognition receptor (PRR), can trigger an innate immune response. The PRR can be a Toll-like Receptor (TLR).

[0207] TLRs are the best characterized type of Pattern Recognition Receptor (PRR) expressed on antigen-presenting cells (APC). APC utilize TLRs to survey the microenvironment and detect signals of pathogenic infection by engaging the cognate ligands of TLRs, PAMPs. PAMP and TLR interaction triggers the innate immune response, the first line of defense against pathogenic insult, manifested as release of cytokines, chemokines and other inflammatory mediators; recruitment of phagocytic cells; and important cellular mechanisms which lead to the expression of costimulatory molecules and efficient processing and presentation of antigens to T-cells. TLRs control both innate and the adaptive immune responses.

[0208] The binding of PAMPs to TLRs activates innate immune pathways. Target cells can result in the display of co-stimulatory molecules on the cell surface, as well as antigenic peptide in the context of major histocompatibility complex molecules (see FIG. 40). The compositions, fusion proteins or polypeptides of the invention can include a PAMP (e.g., a flagellin) that binds to a TLR (e.g., TLR5), promoting differentiation and maturation of the APC, including production and display of co-stimulatory signals (see FIG. 40). The compositions can be internalized by its interaction with the TLR and processed through the lysosomal pathway to generate antigenic peptides, which are displayed on the surface in the context of the major histocompatibility complex.

[0209] The compositions, fusion proteins and polypeptides of the invention employ pathogen-associated molecular patterns (TLR agonists) that trigger cellular events resulting in the expression of costimulatory molecules, secretion of critical cytokines and chemokines; and efficient processing and presentation of antigens to T-cells. As discussed above, TLRs recognize PAMPs including bacterial cell wall components (e.g., bacterial lipoproteins and lipopolysaccharides), bacterial DNA sequences that contain unmethylated CpG residues and bacterial flagellin. TLRs act as initiators of the innate immune response and gatekeepers of the adaptive immune response (Medzhitov, R., et al., Cold Springs Harb. Symp. Quant. Biol. 64:429 (1999); Pasare, C., et al., Semin, Immunol 16:23 (2004); Medzhitov, R., et al., Nature 388:394 (1997); Barton, G. M., et al., Curr. Opin. Immunol 14:380 (2002); Bendelac, A., et al., J. Exp. Med. 195:F19 (2002)).

[0210] As discussed above, the binding of PAMPs to TLRs activates immune pathways for use in the compositions, fusion proteins and polypeptides of the invention, which can be employed in stimulating the immune system in a subject. The compositions, fusion proteins and polypeptides of the invention can trigger an immune response to an antigen (e.g., a viral protein, such as an influenza viral) and trigger signal transduction pathways of the innate and adaptive immune system of the subject to thereby stimulate the immune system of a subject. Stimulation of the immune system of the subject may prevent infection by an antigen or a virus (e.g., an influenza virus) and thereby treat the subject or prevent the subject from disease, illness and, possibly, death.

[0211] In an additional embodiment, the invention is a composition comprising a flagellin component that is at least a portion of a flagellin, wherein the flagellin component includes at least one cysteine residue and whereby the flagellin component activates a Toll-like Receptor 5.

[0212] “Flagellin component,” as used herein, means at least part of or the entirety of a flagellin.

[0213] “Activates,” when referring to a Toll-like Receptor (TLR), means that the component (e.g., a flagellin component or a Toll-like Receptor agonist component) stimulates a response associated with a TLR. For example, bacterial flagellin activates TLR5 and host inflammatory responses (Smith, K. D., et al., Nature Immunology 4:1247-1253 (2003)). Bacterial lipopeptide activates TLR1; Pam3Cys, Pam2Cys activate TLR2; dsRNA activates TLR3; LBS (LPS-binding protein) and LPS (lipopolysaccharide) activate TLR4; imidazoquinolines (anti-viral compounds and ssRNA) activate TLR7; and bacterial DNA (CpG DNA) activates TLR9. TLR1 and TLR6 require heterodimerization with TLR2 to recognize ligands (e.g., TLR agonists, TLR antagonists). TLR1/2 are activated by triacyl lipoprotein (or a lipopeptide, such as Pam3Cys), whereas TLR6/2 are activated by diacyl lipoproteins (e.g., Pam2Cys), although there may be some cross-recognition. In addition to the natural ligands, synthetic small molecules including the imidazoquinolines, with subclasses that are specific for TLR7 or TLR8 can activate both TLR7 and TLR8. There are also synthetic analogs of LPS that activate TLR4, such as monophosphoryl lipid A [MPL].

[0214] TLR activation can result in signaling through MyD88 and NF-κB. There is some evidence that different TLRs induce different immune outcomes. For example, Hirschfeld, et al. Infect Immun 69:1477-1482 (2001)) and Re, et al. J Biol Chem 276:37692-37699 (2001) demonstrated that TLR2 and TLR4 activate different gene expression patterns in dendritic cells. Pulendran, et al J Immunol 167:5067-5076 (2001)) demonstrated that these divergent gene expression patterns were recapitulated at the protein level in an antigen-specific response, when lipopolysaccharides that signal through TLR2 or TLR4 were used to guide the response (TLR4 favored a Th1-like response with abundant IFNγ secretion, while TLR2 favored a Th2-line response with abundant IL-5, IL-10, and IL-13 with lower IFNγ levels). There is redundancy in the outcome of signaling through different TLRs.

[0215] Activation of TLRs can result in increased effector cell activity that can be detected, for example, by measuring IFNγ-secreting CD8+ cells (e.g., cytotoxic T-cell activity); increased antibody responses that can be detected by, for example, ELISA, virus neutralization, and flow cytometry (Schnare, M., et al., Nat Immunol 2:947 (2001); Alexopoulou, L., et al., Nat Med 8:878 (2002); Pasare, C., et al., Science 299:1033 (2003); Napolitani, G., et al., Nat Immunol 6:769 (2005); and Applequist, S. E., et al., J Immunol 175:3882 (2005)).

[0216] The composition comprising a flagellin component that is at least a portion of a flagellin, wherein the flagellin component includes at least one cysteine residue and whereby the flagellin component activates a Toll-like Receptor 5 can further include at least a portion of at least one member selected from the group consisting of a Toll-like Receptor 1 agonist, a Toll-like Receptor 2 agonist (e.g., Pam3Cys, Pam2Cys), a Toll-like Receptor 3 agonist, a Toll-like Receptor 4 agonist, a Toll-like Receptor 6 agonist, a Toll-like Receptor 7 agonist, a Toll-like Receptor 8 agonist a Toll-like Receptor 9 agonist, a Toll-like Receptor 10 agonist, a Toll-like Receptor 11 agonist and a Toll-like Receptor 12 agonist.

[0217] The a Toll-like Receptor 1 agonist, a Toll-like Receptor 2 agonist, a Toll-like Receptor 3 agonist, a Toll-like Receptor 4 agonist, a Toll-like Receptor 6 agonist, a Toll-like Receptor 7 agonist, a Toll-like Receptor 8 agonist a Toll-like Receptor 9 agonist a Toll-like Receptor 10 agonist, a Toll-like Receptor 11 agonist and a Toll-like Receptor 12 agonist employed in the compositions, such as compositions comprising a flagellin component that is at least a portion of a flagellin, wherein the flagellin component includes at least one cysteine residue and whereby the flagellin component activates TLR5, can further include at least one additional cysteine residue.

[0218] In one embodiment, at least one cysteine residue substitutes for at least one amino acid residue in a naturally occurring flagellin amino acid sequence of the flagellin component.

[0219] The cysteine residue that substitutes for at least one amino acid residue in a naturally occurring flagellin amino acid sequence of the flagellin component can be remote to at least one amino acid of the Toll-like Receptor 5 recognition site of the flagellin component. “Toll-like Receptor 5 recognition site,” means that part of the TLR5 ligand (e.g., TLR5 agonist) that interacts with TLR5 to mediate a cellular response. “Toll-like Receptor 5 recognition site” is also referred to as a “Toll-like Receptor 5 activation site” and a “Toll-like Receptor 5 activation domain.”

[0220] Likewise, “Toll-like Receptor recognition site,” means that part of the Toll-like Receptor ligand (e.g., a Toll-like Receptor agonist) that interacts with its respective TLR to mediate a cellular response. “Toll-like Receptor recognition site” is also referred to as a “Toll-like Receptor activation site” and a “Toll-like Receptor activation domain.”

[0221] The cysteine residue that substitutes for at least one amino acid residue in a naturally occurring flagellin amino acid sequence of the flagellin component can also be remote to at least one amino acid of the flagellin component involved in binding to the toll like receptor 5.

[0222] In another embodiment, the flagellin component includes at least a portion of a naturally occurring flagellin amino acid sequence in combination with the cysteine residue.

[0223] The cysteine residue used in combination (also referred to herein as “added cysteine”) with at least a portion of a naturally occurring flagellin amino acid sequence can be at least one member selected from the group consisting of the amino-terminal amino acid of the flagellin component or the Toll-like Receptor agonist component and the carboxy-terminal amino acid of the flagellin component or the Toll-like Receptor agonist component. The cysteine residue used in combination with at least a portion of a naturally occurring flagellin amino acid sequence can be remote to at least one amino acid of the Toll-like Receptor 5 recognition site of the flagellin component or remote to at least one amino acid of the Toll-like Receptor recognition site of the Toll-like Receptor agonist component.

[0224] The cysteine residue used in combination with at least a portion of a naturally occurring flagellin amino acid sequence can be remote to at least one amino acid of the flagellin component involved in binding to the Toll-like Receptor 5 or remote to at least one amino acid of a Toll-like Receptor agonist component involved in binding to the Toll-like Receptor.

[0225] In another embodiment, the flagellin component lacks at least a portion of a hinge region of a naturally occurring flagellin amino acid sequence.

[0226] The composition comprising a flagellin component that is at least a portion of a flagellin, wherein the flagellin component includes at least one cysteine residue and whereby the flagellin component activates a Toll-like Receptor 5 can further include at least a portion of at least one antigen (e.g., an influenza antigen, such as an influenza A, B or C antigen).

[0227] The antigen can be an essentially hydrophobic antigen, such as a maturational cleavage site antigen of HA. The maturational cleavage site antigen can be at least one member selected from the group consisting of (SEQ ID NOS: 530, 532, 533, 534, 535, 600, 601, 602, 603 and NVPEKQTRGIFGAIAGFIE (H3) (SEQ ID NO: 796), NIPSIQSRGLFGAIAGFIE (H1) (SEQ ID NO: 797), PAKLLKERGFFGAIAGFLE (FLU B) (SEQ ID NO: 798), RERRRKKRGLFGAIAGFIE (H5) (SEQ ID NO: 799), RGLXGAIAGFIE (SEQ ID NO: 821), RGLXGAIAGFIE (SEQ ID NO: 822).

[0228] “Essentially hydrophobic,” as used herein, means that the antigen has limited solubility in an aqueous solution or environment. The hydrophobic nature of peptides or proteins can be determined and compared, for example, by the Kyte-Doolitle hydrophobicity scale (Kyte, J., et al., Mol. Biol. 157: 105-132 (1982), (1982)), which assigns a numerical value for each of the 20 amino acids according to relative hydrophobicity. A positive value indicates a hydrophobic amino acid. A negative value indicates a hydrophilic amino acid. The average of these values for an individual peptide or polypeptide (calculated by adding the individual hydrophobicity values for each amino acid of the polypeptide or protein and dividing the total value by the number of amino acids in the polypeptide or protein) provides an index of overall hydrophobicity known as the “grand average of hydropathicity,” also referred to as “GRAVY.” A GRAVY value greater than zero indicates the protein or peptide is essentially hydrophobic. A GRAVY value less than zero indicates the protein or peptide is essentially hydrophilic. The individual hydrophobicity values, for the 20 naturally occurring amino acids according to the Kyte-Doolittle scale (Kyte, J., et al., Mol. Biol. 157: 105-132 (1982)), are as follows:

| | |
|---|---|
| Alanine | 1.8 |
| Arginine | −4.5 |
| Asparagine | −3.5 |
| Aspartic acid | −3.5 |
| Cysteine | 2.5 |
| Glutamine | −3.5 |
| Glutamic acid | −3.5 |
| Glycine | −0.4 |
| Histidine | −3.2 |
| Isoleucine | 4.5 |
| Leucine | 3.8 |
| Lysine | −3.9 |
| Methionine | 1.9 |
| Phenylalanine | 2.8 |
| Proline | −1.6 |
| Serine | −0.8 |
| Threonine | −0.7 |
| Tryptophan | −0.9 |
| Tyrosine | −1.3 |
| Valine | 4.2 |

[0229] The hydrophobicity of antigens, such as protein or peptide antigens, for use in the compositions and methods of the invention can be determined by calculating a GRAVY score based on the hydrophobicity values of the above Kyte-Doolittle scale. For example, GRAVY scores, which indicate essentially hydrophobic peptides, were calculated by addition of the hydrophobicity values (supra) of individual amino acids for the following maturational cleavage site amino peptides:

| | |
|---|---|
| Maturational Cleavage Site | GRAVY |

| | |
|---|---|
| NVPEKQTRGIFGAIAGFIE (A/H3N2) | 0.053 |
| (SEQ ID NO: 800) | |
| NVPQIESRGLFGAIAGFIE (A/H2N1) | 0.453 |
| (SEQ ID NO: 801) | |
| NIPSIQSRGLFGAIAGFIE (A/H1N1) | 0.611 |
| (SEQ ID NO: 802) | |
| RGLFGAIAGFIE (Influenza A conserved region) | 1.067 |
| (SEQ ID NO: 803) | |
| PAKLLKERGFFGAIAGFLE (Influenza B) | 0.400 |
| (SEQ ID NO: 804) | |
| RGFFGAIAGFLE (Influenza B conserved region) | 0.925 |
| (SEQ ID NO: 805) | |

[0230] Likewise, GRAVY scores, which indicate essentially hydrophilic peptides, were calculated for the following peptides:

| | |
|---|---|
| Amino Acid Sequence | GRAVY |

| | |
|---|---|
| human influenza M2e (SEQ ID NO: 806) | |
| SLLTEVETPIRNEWGSRSNDSSDP | −1.129 |
| Vietnam influenza M2e (SEQ ID NO: 807) | |
| GSGAGSLLTEVETPTRNEWECRCSDSSDP | −0.907 |
| Hong Kong influenza M2e (SEQ ID NO: 808) | |
| GSGAGSLLTEVETLTRNGWGCRCSDSSDP | −0.507 |
| West Nile Virus E peptide 001 | |
| (SEQ ID NO: 809) | |
| LTSGHLKCRVKMEKLQLKGT | −0.475 |
| Dengue 2 E peptide (SEQ ID NO: 810) | |
| EAEPPFGDSYIIIGVEPGQLKLNWFKK | −0.333 |
| BCRABL wt peptide (SEQ ID NO: 811) | |
| SLLTEVETPIRNEWGSRSNDSSDP | −1.129 |

[0231] An antigen can be any molecule (e.g., protein, peptide, glycoprotein, glycopeptide, carbohydrate, lipid, lipopeptide, polysaccharide) that can be recognized by the components of the immune system regardless of whether it can trigger activation of the immune system. The antigen can be a fragment or portion of a naturally occurring antigen or a synthetic molecule that mimics the naturally occurring antigen or a portion of the naturally occurring antigen.

[0232] The antigen can be a viral antigen. A “viral antigen,” as used herein, refers to any portion of a virus (e.g., influenza virus, flavivirus) that generates an immune response in a subject either when employed in combination with a TLR agonist (e.g., a flagellin, Pam2Cys, Pam3Cys) or in the absence of a TLR agonist. The viral antigen can be a portion or a fragment of a naturally occurring virus or a synthetic molecule that mimics a naturally occurring virus, such as a recombinant or synthetic protein (e.g., influenza virus, flavivirus), peptide, lipid, carbohydrate, that generates an immune response in the subject. The influenza antigen can include at least one member selected from the group consisting of an influenza A antigen, influenza B antigen and an influenza C antigen. The influenza antigen can be an influenza virus integral membrane protein, such as HA, or a protein portion of HA, such as HA1-1 and HA1-2.

[0233] The antigen can be at least a portion of an influenza Matrix 2 (M2) protein, including at least a portion of the ectodomain of an influenza M2 protein (M2e).

[0234] Matrix protein 2 (M2 or M2 protein) is a proton-selective integral membrane ion channel protein of the influenza A virus. M2 is abundantly expressed at the plasma membrane of virus-infected cells, but is generally underexpressed by virions. For example, a portion of an M2 sequence of influenza A is SEQ ID NO: 508, which is encoded by SEQ ID NO: 509. The native form of the M2 protein is a homotetramer (i.e., four identical disulfide-linked M2 protein molecules). Each of the units are helices stabilized by two disulfide bonds. M2 is activated by low pH. Each of the M2 protein molecules in the homotetramer consists of three domains: a 24 amino acid outer or N (amino)-terminal domain (e.g., SEQ ID NO: 510; also referred to herein as a “human consensus sequence”), which is encoded by SEQ ID NO: 511; a 19 hydrophobic amino acid transmembrane region, and a 54 amino acid inner or C (carboxy)-terminal domain. The M2 protein can vary depending upon the influenza viral subtype (e.g., H1 and H5 subtypes of influenza A) and influenza viral source (e.g., Puerto Rico, Thailand, New York, Hong Kong), as shown, for example, in exemplary amino-terminal sequences of M2 proteins (SEQ ID NOS: 544-556 and 570-578) and as described in PCT/US2005/046662 (WO2006/069262).

[0235] The M2 protein has an important role in the life cycle of the influenza A virus. It is important in the uncoating stage where it permits the entry of protons into the viral particle, which lowers the pH inside the virus, resulting in dissociation of the viral matrix protein M1 from the ribonucleoprotein RNP. As a consequence, the virus coat is removed and the contents of the virus are released from the endosome into the cytoplasm of the host cell for infection.

[0236] The function of the M2 channel can be inhibited by antiviral drugs, such as amantadine and rimantadine, which prevent the virus from infecting the host cell. Such antiviral drugs usually bind the transmembrane region of the M2 protein and sterically block the ion channel created by the M2 protein, which prevents protons from entering and uncoating the virion.

[0237] The M2 protein for use in the compositions and methods of the invention can that include at least a portion of SEQ ID NO: 510 encoded by SEQ ID NO: 511 or at least a portion of SEQ ID NO: 544, encoded by SEQ ID NO: 603. The M2 protein can further include at least one member selected from the group consisting of SEQ ID NO: 512, SEQ ID NO: 516, SEQ ID NO: 531; SEQ ID NO: 536 (Flu A H5N1 M2e, 2004 Viet Nam Isolate with serine replacing cysteine); SEQ ID NO: 537 (Flu A H5N1 M2e, 2004 Viet Nam Isolate); SEQ ID NO: 538 (Flu A H5N1 M2e, Hong Kong 97 Isolate with serine replacing cysteine); SEQ ID NO: 539 (Flu A H5N1 M2e, Hong Kong 97 Isolate); SEQ ID NO: 540 (Flu A H7N2 M2e Chicken/New York 95 Isolate with serine replacing cysteine); SEQ ID NO: 541 (Flu A H7N2 M2e, Chicken/New York 95 Isolate); SEQ ID NO: 542 (Flu A H9N2 M2e, Hong Kong 99 Isolate with serine replacing cysteine); and SEQ ID NO: 543 (Flu A, Hong Kong 99 Isolate). Certain cysteine residues, for example, amino acids 16 and 18 of SEQ ID NO: 537; amino acids 17 and 19 of SEQ ID NOS: 539, 541 and 543 in the naturally occurring sequence of at least a portion of M2 protein are replaced with a serine (see, SEQ ID NOS: 538, 540, 542 and 544, respectively).

[0238] The compositions comprising a flagellin component that is at least a portion of a flagellin, wherein the flagellin component includes at least one cysteine residue and whereby the flagellin component activates a Toll-like Receptor 5 that further includes an antigen (e.g., a maturational cleavage site peptide, protein portion of HA, such as HA1-1, HA1-2) can be co-administered or admixed with another flagellin component that is at least a portion of a flagellin, wherein the flagellin component includes at least one cysteine residue and whereby the flagellin component activates a Toll-like Receptor 5 that further includes a different, distinct antigen (e.g., M2e) or a fusion protein of a TLR agonist and an antigen (e.g., STF2.HA1-1, STF2.HA1-2, STF2Δ.HA1-1, STF2Δ.HA1-2, STF2.M2e, STF2.4×M2e, STF2Δ.M2e, STF2Δ.4×M2e).

[0239] The antigen included in the compositions and employed in the methods of the invention can be at least a portion of a microbial-related antigen, for example, antigens of pathogens, such as viruses, fungi or bacteria. Antigens can also be microorganism-related, and other disease-related antigens, such as antigens associated with allergies and cancer. The antigen can also be at least a portion of an antigen of a bacteria, a virus, a fungi, a yeast, a protozoa, a metazoa, a tumor, a malignant cell, a plant cell, an animal cell, a hormone and an amyloid-β peptide. The antigen can be a peptide, a polypeptide, a lipoprotein, a glycoprotein and a mucoprotein.

[0240] The antigen included in the compositions and employed in the methods of the invention can be a pathogen-related antigen. “Pathogen-related antigen,” as used herein, refers to any molecule (e.g., protein, peptide, carbohydrate, lipoprotein, polysaccharide) that is associated with a pathogen. Exemplary pathogen-related antigens include, for example, antigens of vaccinia, avipox virus, turkey influenza virus, bovine leukemia virus, feline leukemia virus, avian influenza, chicken pneumovirosis virus, canine parvovirus, equine influenza, FHV, Newcastle Disease Virus (NDV), Chicken/Pennsylvania/1/83 influenza virus, infectious bronchitis virus; Dengue virus, measles virus, Rubella virus, pseudorabies, Epstein-Barr Virus, HIV, SIV, EHV, BHV, HCMV, Hantaan, C. tetani, mumps, Morbillivirus, Herpes Simplex Virus type 1, Herpes Simplex Virus type 2, Human cytomegalovirus, Hepatitis A Virus, Hepatitis B Virus, Hepatitis C Virus, Hepatitis E Virus, Respiratory Syncytial Virus, Human Papilloma Virus, Influenza Virus, Salmonella, Neisseria, Borrelia, Chlamydia, Bordetella, Plasmodium (e.g., Plasmodium falciparum and Plasmodium vivax), Toxoplasma, Cryptococcus, Streptococcus, Staphylococcus, Haemophilus, Diptheria, Tetanus, Pertussis, Escherichia, Candida, Aspergillus, Entamoeba, Giardia and Trypanasoma.

[0241] The antigen included in the compositions and employed in the methods of the invention can include bacterial capsular antigens. Exemplary bacterial capsular antigens include, for example, at least one member selected from the group consisting of a Group B Streptococcus, including Streptococcus agalactiae, capsular polysaccharides type Ia, Ib, Ia/c, II, III, IV, V and VI; Streptococcus pneumoniae capsular polysaccharides types 1, 2, 3, 4, 5, 6A, 6B, 7F, 9N, 9V, 10A, 11A, 12F, 14, 15B, 17F, 18C, 19A, 20, 22F, 23F, and 33F or any combination of these (typing according to the Danish system); Stapylococcus aureus capsular polysaccharides type 5, 8 and 336; Bacillus anthracis vegetative state capsular poly gamma D glutamic acid; Mycobacteria tuberculosis lipo-arabino mannan capsule; Plasmodium flaciparum surface oligosaccharide; Neisseria meningitidis capsular polysaccharides of group A, B, C, X, Y and W135 or any combination thereof.

[0242] Compositions comprising the flagellin component that is at least a portion of a flagellin, wherein the flagellin component includes at least one cysteine residue and whereby the flagellin component activates a Toll-like Receptor 5 can include an antigen that is produced by chemical modification of the side-chains of the antigen (e.g., capsular antigens, pathogen-related antigens, influenza antigens, flavivirus antigens) in a manner that generates an active group that is coupled (also referred to herein as chemical conjugation) to a compatible reactive group created on the substituted flagellins of the invention (see infra). Derivatization (modification) of the capsular material is carried out so that a small minority of the side-chains are modified (about 5%) to avoid destruction of the majority of immunoreactive structures on the capsular material.

[0243] The antigen included in the compositions and employed in the methods of the invention can be at least a portion of at least one member selected from the group consisting of a West Nile viral protein, a Langat viral protein, a Kunjin viral protein, a Murray Valley encephalitis viral protein, a Japanese encephalitis viral protein, a Tick-borne encephalitis viral protein, Dengue 1 viral protein, Dengue 2 viral protein, Dengue 3 viral protein, Dengue 4 viral protein, hepatitis C viral protein and a Yellow fever viral protein (see, for example, PCT/US2006/001623 (WO2006/078657)).

[0244] The genus flavivirus is in the virus family Flaviviridae and consists of about 70 viruses. Mosquito or ticks transmit most of these viruses. Several flaviviruses are significant human pathogens, including the four dengue viruses (Den1, Den2, Den3 and Den4), yellow fever (YF), Japanese encephalitis (JE), West Nile (WN, also referred to herein as “WNV”) and Tick-borne encephalitis (TBE) (Weaver S. C., et al., Nat Rev Microbiol 10: 789-801 (2004)). The flavivirus genus is divided into a number of serogroups based on cross-neutralization tests, including the dengue serogroup that contains four serologically and genetically distinct viruses termed. DEN-1, DEN-2, DEN-3 and DEN-4.

[0245] Flaviviruses are small, enveloped viruses with icosahedral capsids. The flavivirus genome is a single-stranded positive-sense RNA (about 11 kb) that is directly translated by the host cell machinery following infection. The viral genome is translated as a single polypeptide that undergoes co- and post-translational cleavage by viral and cellular enzymes to generate three structural proteins of the flavivirus (the capsid (C), the membrane (M) and the envelope (E) proteins); and seven nonstructural proteins (NS1, NS2A, NS2B, NS3, NS4A, NS4B, and NS5) (Weaver, et al., Annu Rev Microbiol 1990:44-649 (2004)). The viral capsid is composed of the C-protein, while both the M- and envelope proteins are located on the envelope surface of the virion (Weaver, S. C., et al., Nat. Rev. Microbiol. 10:789-801 (2004); Chambers et al., Annu Rev. Microbiol. 44: 649-688 (1990)). A major immunogen for flaviviruses is the membrane envelope protein.

[0246] A flavivirus can enter a host cell when the viral envelope protein binds to a receptor and responds by conformational rearrangement to the reduced pH of an endosome. The conformational change induces fusion of viral and host-cell membranes.

[0247] The envelope of a flavivirus may function as a receptor binding protein and to facilitate fusion of the virus and host cell membrane. Envelope proteins of flaviviruses have common structural (domains I, II and III) and functional features (receptor binding of virus and host cell and fusion functions) and are class II fusion glycoproteins (Lescar et al., Cell 105:137-148 (2001)).

[0248] In the pre-fusion conformation, envelope proteins form homodimers on the outer surface of the virus particles (Rey, et al., Nature 375:291-298); Kuhn, et al., Cell 108:717-725 (2002); Mukhopadhyay, et al., Science 302:248 (2003)). Each envelope protein monomer folds into three structural domains (domains I, II and III) predominantly composed of β-strands. Domain I (also referred to herein as “I” or “DI”) is centrally located in the structure and has an N-glycosylation site in glycosylated envelope proteins. Domain II (also referred to herein as “II” or “DII”) of the envelope protein promotes dimerization and has a fusion loop that inserts into the target host membrane during the pH-dependent fusion of the virus (Modis, et al., Nature 427:313-319 (2004); Bressanelli, et al., EMBO J 23.728-738 (2004)). Domain III (also referred to herein as “III” or “DIII”) is at the carboxy-terminus of the envelope protein. Domain III is also referred to as “domain B” in earlier antigenic mapping studies. Domain III has several epitopes that can elicit virus-neutralizing antibodies (Roehrig, Adv Virus Res 59:141-175 (2003)).

[0249] Domain I of the Tick-borne encephalitis envelope protein corresponds to amino acids 1-51, 137-189 and 285-302 of SEQ ID NO: 777; domain II of the Tick-borne encephalitis envelope protein of SEQ ID NO: 777 corresponds to amino acids 52-136 and 190-284; and domain III corresponds to amino acids 303-395 of SEQ ID NO: 777. (Rey, F. A., et al., Nature 375:291-298 (1995)). SEQ ID NO: 777 is encoded by SEQ ID NO: 778. Domain I of the Dengue 2 flavivirus envelope protein corresponds to amino acids 1-52, 132-193 and 280-296 of SEQ ID NO: 763; domain II corresponds to amino acids 53-131 and 194-279 of SEQ ID NO: 763; and domain III corresponds to amino acids 297-495 of SEQ ID NO: 763 (Modis, Y., et al., Nature 427:313-319 (2004)). The location of domains I, II and III of other flavivirus (e.g., West Nile virus, Japanese encephalitis, Dengue 1 virus, Dengue 3 virus and Dengue 4 virus) is based on homology of the Tick-borne encephalitis envelope protein domains and the Dengue 2 envelope protein domains. Thus, reference herein to domains of flavivirus proteins, in particular, flaviviruses other than Tick-borne encephalitis flavivirus envelope proteins and Dengue 2 flavivirus envelope proteins, are based on homology to domains in the Tick-borne encephalitis flavivirus envelope protein and the Dengue 2 flavivirus envelope protein.

[0250] The domain III of the envelope protein of the DEN flavivirus encodes the majority of the flavivirus type-specific contiguous critical/dominant neutralizing epitopes (Roehring, J. T., Adv. Virus Res. 59:141 (2003)), including the four DEN (DEN1, DEN2, DEN3, DEN4) viruses. Flavivirus envelope proteins are highly homologous. Exemplary envelope protein sequences are SEQ ID NOS: 642, 763, 765, 767, 769 and 774.

[0251] West Nile virus (WNV) is a single-stranded positive sense RNA envelope virus. It was first isolated and identified in the West Nile region of Uganda in 1937 from a febrile female adult (Smithburn, et al., Am J Trop Med Hyg 3.9-18 (1954)).

[0252] Japanese encephalitis (JE) virus is localized in Asia and northern Australia (about 50,000 cases with about 10,000 deaths annually).

[0253] The Dengue (DEN) disease is caused by four mosquito-borne, serologically related flaviviruses known as DEN-1 (also referred to herein as “Den1” or Den 1”), DEN-2 (also referred to herein as “Den2” or “Den 2”), DEN-3 (also referred to herein as “Den3” or “Den 3”), and DEN-4 (also referred to herein as “Den4” or Den 4”). The compositions, fusion proteins and polypeptides of the invention can include Den 1 SEQ ID NO.: 623; Den 1 PR 94 (Puerto Rico, 1994) SEQ ID NO: 624; Den 3 SEQ ID NO: 626; and Den 4 SEQ ID NO: 627. SEQ ID NOS: 623, 624, 625, 626 and 627 are portions of domain III of Den1, Den2, Den3 and Den4 flaviviruses.

[0254] “EI,” “EII,” and “EIII,” as used herein, refer to domains I, II and III, respectively, of the West Nile flavivirus envelope protein. “JEI,” “JEII,” and “JEIII,” as used herein, refer to domains I, II and III, respectively, of the Japanese encephalitis flavivirus envelope protein. “Den1 I,” “Den1 II,” and “Den1 III,” as used herein refer to domains I, II and III, respectively, of the Dengue 1 flavivirus envelope protein. Likewise, designations for the domains of envelope proteins of other flaviviruses are referenced by the flavivirus name followed by the domain number (e.g., (Tick-borne) TBI (Tick-borne), TBII, TBIII, Den2 I, Den2 II, Den2 III).

[0255] The portion of an envelope protein of a flavivirus can include at least one member selected from the group consisting of at least a portion of domain I, at least a portion of domain II and at least a portion of domain III. When a domain is designated with a “+,” for example “EIII+” or “JEIII+,” the portion of the envelope protein referenced as “III” is one component of the total of that domain plus at least one of at least a portion of either or both of domains I and II. For example, “EIII+,” as used herein, means the compositions, fusion proteins and polypeptides of the invention include domain III and at least a portion of domain I. “EIII+” is also referred to as “EI/III.” “JEIII+” is also referred to as “JEI/III.” Similarly, when compositions include domains of envelope proteins of flavivirus, the domains can be any combination of domains I, II, and III and can be designated based on the domain. For example, EI/II includes domain I and II of the West Nile flavivirus. The absence of a “+” in reference to a domain (e.g., EIII, JEIII, Den1 III) of an envelope protein employed in the compositions, fusion proteins and polypeptides of the invention means that the composition, fusion protein and polypeptide includes the referenced domain. For example, “Den1 III” means the compositions, fusion proteins and compositions include domain III, not domains I and II, of the Dengue 1 virus.

[0256] The West Nile viral envelope protein can include at least a portion of at least one member selected from the group consisting of SEQ ID NO: 610, which is an EIII+ amino acid sequence, the italicized amino acids are domain I of the envelope protein and the remaining sequence is domain III of the envelope protein; SEQ ID NO: 611, West Nile virus, Stanford, Conn., also referred to as “West Nile S”; SEQ ID NO: 612, West Nile virus, New York, N.Y., also referred to as “West Nile NY”; and SEQ ID NO: 613, SEQ ID NO: 610 is encoded by SEQ ID NO: 614.

[0257] The Langat virus envelope protein for use in the compositions, fusion proteins and polypeptides of the invention can include at least a portion of SEQ ID NO: 615. The Kunjin virus envelope protein can include at least a portion of SEQ ID NO: 616. The Murray Valley encephalitis envelope protein can include at least a portion of SEQ ID NO: 617. The Japanese encephalitis envelope protein can include at least one member selected from the group consisting of at least a portion of SEQ ID NO: 618 and SEQ ID NO: 619. The Tick-borne encephalitis envelope protein can include at least a portion of SEQ ID NO: 620. The Yellow fever virus envelope protein can include at least a portion of SEQ ID NO: 621. The envelope protein of a flavivirus can include at least a portion of at least one member selected from the group consisting of SEQ ID NO: 622 and SEQ ID NO: 643. SEQ ID NOS: 615, 616, 617, 618, 619, 620, 621, 622 and 643 are portions of domain III of the viral envelope protein.

[0258] The antigen can be chemically conjugated to flagellin components and Toll-like Receptor agonist components. Chemical conjugation (also referred to herein as “chemical coupling”) can include conjugation by a reactive group, such as a thiol group (e.g., a cysteine residue) or by derivatization of a primary (e.g., a amino-terminal) or secondary (e.g., lysine) group. Different crosslinkers can be used to chemically conjugate TLR ligands (e.g., TLR agonists) to proteins (e.g., antigens, compositions of the invention, HA and M2e constructs of the invention) or other molecules (e.g., nucleic acids, polysaccharides). Exemplary cross linking agents are commercially available, for example, from Pierce (Rockland, Ill.). Methods to chemically conjugate the antigen to the flagellin component are well-known and include the use of commercially available cross-linkers, such as those described herein.

[0259] For example, conjugation of peptide or protein antigens to a flagellin component or a Toll-like Receptor agonist component of the invention can be through at least one cysteine residue of the flagellin component or the Toll-like Receptor component and at least one cysteine residue of a protein (e.g., an influenza antigen, such as HA, M2e) employing established techniques. The protein can be derivatized with a homobifunctional, sulfhydryl-specific crosslinker; the protein is then desalted to remove the unreacted crosslinker; and then the peptide or protein partner added and conjugated via at least one cysteine residue cysteine. Exemplary reagents for use in the conjugation methods can be purchased commercially from Pierce (Rockland, Ill.), for example, BMB (Catalog No: 22331), BMDB (Catalog No: 22332), BMH (Catalog No: 22330), BMOE (Catalog No: 22323), BM[PEO]₃ (Catalog No: 22336), BM[PEO]₄ (Catalog No:22337), DPDPB (Catalog No: 21702), DTME (Catalog No: 22335), HBVS (Catalog No: 22334).

[0260] Alternatively, cysteine-containing proteins and antigens can also be conjugated to lysine residues on flagellin components, flagellin, Toll-like Receptor agonist components and Toll-like Receptor agonists of the invention. A protein containing no cysteine residues is derivatized with a heterobifunctional amine and sulfhydryl-specific crosslinker. After desalting, the cysteine-containing partner is added and conjugated. Exemplary reagents for use in the conjugation methods can be purchased from Pierce (Rockland, Ill.), for example, AMAS (Catalog No: 22295), BMPA (Catalog No. 22296), BMPS (Catalog No: 22298), EMCA (Catalog No: 22306), EMCS (Catalog No: 22308), GMBS (Catalog No: 22309), KMUA (Catalog No: 22211), LC-SMCC (Catalog No: 22362), LC-SPDP (Catalog No: 21651), MBS (Catalog No: 22311), SATA (Catalog No: 26102), SATP (Catalog No: 26100), SBAP (Catalog No: 22339), SIA (Catalog No: 22349), SIAB (Catalog No: 22329), SMCC (Catalog No: 22360), SMPB (Catalog No: 22416), SMPH (Catalog No. 22363), SMPT (Catalog No: 21558), SPDP (Catalog No: 21857), Sulfo-EMCS (Catalog No: 22307), Sulfo-GMBS (Catalog No: 22324), Sulfo-KMUS (Catalog No: 21111), Sulfo-LC-SPDP (Catalog No: 21650), Sulfo-MBS (Catalog No: 22312), Sulfo-SIAB (Catalog No: 22327), Sulfo-SMCC (Catalog No: 22322), Sulfo-SMPB (Catalog No: 22317), Sulfo-LC-SMPT (Catalog No.: 21568).

[0261] Additionally, or alternatively, peptide or protein antigens can also be conjugated to flagellin components or Toll-like Receptor agonist components of the invention via at least one lysine residue on both conjugate partners. The two conjugate partners are combined along with a homo-bifunctional amine-specific crosslinker. The appropriate hetero-conjugate is then purified away from unwanted aggregates and homo-conjugates. Exemplary reagents for use in the conjugation methods can be purchased from Pierce (Rockland, Ill.), for example, BSOCOES (Catalog No: 21600), BS₃ (Catalog No: 21580), DFDNB (Catalog No: 21525), DMA (Catalog No: 20663), DMP (Catalog No: 21666), DMS (Catalog No: 20700), DSG (Catalog No: 20593), DSP (Catalog No: 22585), DSS (Catalog No: 21555), DST (Catalog No: 20589), DTBP (Catalog No: 20665), DTSSP (Catalog No: 21578), EGS (Catalog No: 21565), MSA (Catalog No: 22605), Sulfo-DST (Catalog No: 20591), Sulfo-EGS (Catalog No: 21566), THPP (Catalog No: 22607).

[0262] Similarly, peptide or protein antigens can be conjugated to flagellin components or Toll-like Receptor agonist components of the invention via at least one carboxyl group (e.g., glutamic acid, aspartic acid, or the carboxy-terminus of the peptide or protein) on one partner and amines on the other partner. The two conjugation partners are mixed together along with the appropriate heterobifunctional crosslinking reagent. The appropriate hetero-conjugate is then purified away from unwanted aggregates and homo-conjugates. Exemplary reagents for use in the conjugation methods can be purchased from Pierce (Rockland, Ill.), for example, AEDP (Catalog No: 22101), EDC (Catalog No: 22980) and TFCS (Catalog No: 22299).

[0263] In addition, carbohydrate antigens can be conjugated to proteins, flagellin components, flagellin, Toll-like Receptor agonist components and Toll-like Receptor agonists of the invention via at least one cysteine residue in the protein employing well-established techniques. For example, the protein is initially derivatized with a heterobifunctional crosslinker containing at least one sulfhydryl-specific group and at least one hydrazide group. The polysaccharide or oligosaccharide is then treated with an oxidizing agent such as sodium meta-periodate to generate terminal aldehyde groups. The oxidized carbohydrate is then added to the derivatized protein and conjugation to the aldehyde occurs via the hydrazide on the crosslinker. Exemplary reagents for use in the conjugation methods can be purchased from Pierce (Rockland, Ill.), for example, BMPH (Catalog No: 22297), EMCH (Catalog No: 22106), KMUH (Catalog No: 22111) and PDPH (Catalog No: 22301).

[0264] Further lipopeptides can be conjugated to protein antigens, flagellin components or Toll-like Receptor components or Toll-like Receptor agonists of the invention via amino-acid side chains on the peptide chain. Similar strategies and reagents, as described above for peptide conjugation to proteins, would be employed.

[0265] TLRs can be activated by nucleic acids. For example, TLR3 is activated by double-stranded (ds) RNA; TLR7 and TLR8 are activated by single-stranded (ss) RNA; and TLR9 is activated by CpG DNA sequences. Several different techniques can be employed to conjugate Toll-like Receptor agonist components of nucleic acid TLRs to protein antigens. For example, for un-modified DNA molecule, the 5′ phosphate group can be modified with the water-soluble carbodiimide EDC (Pierce; Rockford, Ill., Catalog No: 22980) followed by imidazole to form a terminal phosphoylimidazolide. A terminal amine can then be substituted for this reactive group by the addition of ethylenediamine. The amine-modified nucleic acid can then be conjugated to a cysteine on a protein using a heterobifunctional maleimide (cysteine-specific) and NHS-ester (lysine-specific) crosslinker, as described above for peptide-protein conjugation.

[0266] Alternatively, or additionally, a sulfhydryl group can be incorporated at the 5′ end by substituting cystamine for ethylenediamine in the second step. After reduction of the disulfide bond, the free sulfhydryl can be conjugated to cysteines on proteins, flagellin components, flagellin, Toll-like Receptor agonist components and Toll-like Receptor agonists employing a homo-bifunctional maleimide-based crosslinker, or to lysines using a heterobifunctional crosslinker, as described above. Alternately, or additionally, synthetic oligonucleotides can be synthesized with modified bases on either the 5′ or 3′ end. These modified bases can include primary amine or sulfhydryl groups which can be conjugated to proteins using the methods described above. The 3′ end of RNA molecules may be chemically modified to allow coupling with proteins or other macromolecules. The diol on the 3′-ribose residue may be oxidized using sodium meta-periodate to produce an aldehyde group. The aldehyde may then be conjugated to proteins using a hydrazide-containing crosslinker, such as MPBH (Pierce; Rockland, Ill., Catalog No: 22305), which covalently modifies the carbonyl group, and then conjugates to free thiols on proteins via a maleimide group. Alternatively, the 3′ hydroxyl group may be derivatized directly with an isocyanate-containing crosslinker, such as PMPI (Pierce; Rockland, Ill., Catalog No: 28100), which also contains a maleimide group for conjugation to protein sulfhydryls.

[0267] Synthetic small-molecule TLR ligands (e.g., Toll-like Receptor agonists, Toll-like Receptor antagonists) have been identified. For example, imiquimod, which potently activates TLR7, and resiquimod, an activator of both TLR7 and TLR8. Analogs of these compounds with varying levels of potency and specificity have been synthesized. The ability to conjugate a small molecule TLR agonist to an antigen of interest can depend on the chemical nature of the TLR ligand. Some TLR ligands may have active groups that can be exploited for chemical conjugation. For example, imiquimod, as well as its analog gardiquimod (InvivoGen; San Diego, Calif.) and the TLR7-activating adenine analog CL087 (InvivoGen, San Diego, Calif.), have primary amine groups (—NH₂), which can be targets for derivatization by crosslinkers containing imidoesters or NHS esters. In another strategy, gardiquimod contains an exposed hydroxyl (—OH) group, which can be derivatized by an isocyanate-containing crosslinker, such as PMPI (Pierce; Rockland, ILL Catalog No: 28100) for subsequent crosslinking to protein sulfhydryl groups.

[0268] In addition, custom synthesis of derivatives of small-molecule TLR ligands can be arranged in order to attach novel functional groups at different positions in the molecule to facilitate crosslinking. Custom derivatives can also include groups, such as maleimides, which can then be used for direct linking to protein antigens.

[0269] Chemical conjugation of an antigen to the flagellin component can result in increased aqueous solubility of the antigen (e.g., an essentially hydrophobic antigen, such as a maturational cleavage site antigen) as a component of the composition.

[0270] The composition comprising a flagellin component that is at least a portion of a flagellin, wherein the flagellin component includes at least one cysteine residue and whereby the flagellin component activates a Toll-like Receptor 5 can include a cysteine residue in the hypervariable region of the flagellin component.

[0271] At least one cysteine residue substitutes for at least one amino acid in a naturally occurring flagellin amino acid sequence flagellin component. The cysteine residue can substitute for at least one amino acid selected from the group consisting of amino acid 1, 237, 238, 239, 240, 241 and 495 of SEQ ID NO: 812; at least one amino acid selected from the group consisting of amino acid 1, 240, 241, 242, 243, 244 and 505 of SEQ ID NO: 498; at least one amino acid selected from the group consisting of amino acid 1, 237, 238, 239, 240, 241 and 504 of SEQ ID NO: 504; at least one amino acid selected from the group consisting of amino acid 1, 211, 212, 213 and 393 of SEQ ID NO: 815; at least one amino acid selected from the group consisting of amino acid 1, 151, 152, 153, 154 and 287 of SEQ ID NO: 820; at least one amino acid selected from the group consisting of amino acid 1, 238, 239, 240, 241, 242, 243 and 497 of SEQ ID NO: 502; at least one amino acid selected from the group consisting of amino acid 1, 237, 238, 239, 240, 241 and 495 of SEQ ID NO: 812.

[0272] The flagellin component or Toll-like Receptor agonist component can include at least a portion of a naturally occurring flagellin amino acid sequence in combination with the cysteine residue.

[0273] The composition of the invention wherein the cysteine residue substitutes for at least one amino acid in a naturally occurring flagellin amino acid sequence flagellin component, or wherein the flagellin component includes at least a portion of a naturally occurring flagellin amino acid sequence in combination with the cysteine residue, can activate a Toll-like Receptor 5. For example, a cysteine residue can be placed within the D1/D2 domain proximate to the amino-terminus and carboxy-terminus, remote to the TLR5 recognition site (see, for example, FIGS. 75 and 76). Alternatively, or additionally, the cysteine residue can be placed at the distal point of the hypervariable domain (see, for example, FIGS. 75 and 76) at about amino acid 237, about 238, about 239, about 240 and about 241 of SEQ ID NO: 812. Substituting polar or charged amino acids is preferable to substituting hydrophobic amino acids with cysteine residues. Substitution within the TLR5 recognition site is least preferable.

[0274] Flagellin from Salmonella typhimurium STF1 (FliC) is depicted in SEQ ID NO: 812 (Accession No: P06179). The TLR5 recognition site is amino acid about 79 to about 117 and about 408 to about 439. Cysteine residues can substitute for or be included in combination with amino acid about 408 to about 439 of SEQ ID NO: 812; amino acids about 1 and about 495 of SEQ ID NO: 812; amino acids about 237 to about 241 of SEQ ID NO: 812; and/or amino acids about 79 to about 117 and about 408 to about 439 of SEQ ID NO: 812.

[0275] Salmonella typhimurium flagellin STF2 (FljB) is depicted in SEQ ID NO: 498. The TLR5 recognition site is amino acids about 80 to about 118 and about 420 to about 451 of SEQ ID NO: 498. Cysteine residues can substitute for or be included in combination with amino acids about 1 and about 505 of SEQ ID NO: 498; amino acids about 240 to about 244 of SEQ ID NO: 498; amino acids about 79 to about 117 and/or about 419 to about 450 of SEQ ID NO: 498.

[0276] Salmonella muenchen flagellin is depicted in SEQ ID NO: 504 (Accession No: #P06179). The TLR5 recognition site is amino acids about 79 to about 117 and about 418 to about 449 of SEQ ID NO: 504. Cysteine residues can substitute for or be included in combination with amino acids about 1 and about 504 of SEQ ID NO: 504; about 237 to about 241 of SEQ ID NO: 504; about 79 to about 117; and/or about 418 to about 449 of SEQ ID NO: 504.

[0277] Escherichia coli flagellin is depicted in SEQ ID NO: 502 (Accession No: P04949). The TLR5 recognition site is amino acids about 79 to about 117 and about 410 to about 441 of SEQ ID NO: 502. Cysteine residues can substitute for or be included in combination with amino acids about 1 and about 497 of SEQ ID NO: 502; about 238 to about 243 of SEQ ID NO: 502; about 79 to about 117; and/or about 410 to about 441 of SEQ ID NO: 502.

[0278] Pseudomonas aeruginosa flagellin is depicted in SEQ ID NO: 815. The TLR5 recognition site is amino acids about 79 to about 114 and about 308 to about 338 of SEQ ID NO: 815. Cysteine residues can substitute for or be included in combination with amino acids about 1 and about 393 of SEQ ID NO: 815; about 211 to about 213 of SEQ ID NO: 815; about 79 to about 114; and/or about 308 to about 338 of SEQ ID NO: 815.

[0279] Listeria monocytogenes flagellin is depicted in SEQ ID NO: 820. The TLR5 recognition site is amino acids about 78 to about 116 and about 200 to about 231 of SEQ ID NO: 820. Cysteine residues can substitute for or be included in combination with amino acids about 1 and about 287 of SEQ ID NO: 820; about 151 to about 154 of SEQ ID NO: 820; about 78 to about 116; and/or about 200 to about 231 of SEQ ID NO: 820.

[0280] Experimentally defined TLR5 recognition sites on STF2 have been described (see, for example, Smith, K. D., et al., Nature Immunology 4:1247-1253 (2003) at amino acids about 79 to about 117 and about 420 to about 451. In addition, Smith, K. D., et al., Nature Immunology 4:1247-1253 (2003), based on sequence homology, identified TLR5 recognition sites on other flagellins, such as STF1 at amino acids about 79 to about 117, about 408 to about 439; P. aeruginosa at amino acids about 79 to about 117, about 308 to about 339; L. pneumophila at amino acids about 79 to about 117, about 381 to about 419; E. coli at amino acids about 79 to about 117, about 477, about 508; S. marcesens at amino acids about 79 to about 117, about 265-about 296; B. subtilus at amino acids about 77 to about 117, about 218 to about 249; and L. monocytogenes at amino acids about 77 to about 115, about 200 to about 231.

[0281] The high-resolution structure STF1 (FliC) (SEQ ID NO: 812) has been determined and can be a basis for analysis of TLR5 recognition by a flagellin and the location of cysteine substitutions/additions. Flagellin resembles a “boomerang,” with the amino- and carboxy-termini at the end of one arm (see, for example FIG. 77). The TLR5 recognition site is located roughly on the outer side of the boomerang just below the bend toward the amino- and carboxy-termini of the flagellin. The hinge region, which is not required for TLR5 recognition, is located above the bend. The region of greatest sequence homology of flagellins is in the TLR5 recognition site. The next region of sequence homology is in the D1 and D2 domains, which include the TLR5 recognition site and the amino- and carboxy-termini. The D1 and D2 domains, with or without a linker, is STF2Δ (SEQ ID NO: 500), which can activate TLR5. The region of least sequence homology between flagellins is the hypervariable region.

[0282] It is believed that the ability of the flagellin component or Toll-like Receptor agonist component to activate TLR5 can be accomplished by maintaining the conjugation sites (cysteine residues substituted for at least one amino acid in a naturally occurring flagellin amino acid sequence flagellin component or at least a portion of a naturally occurring flagellin amino acid sequence in combination with the cysteine residue) remote from the TLR5 or TLR recognition site. For example, for STF1 (SEQ ID NO: 812), for which a high resolution structural determination is available, this may be achieved in the D1 domain, D2 domain or in the hinge region. In the D1/D2 domain the amino- and carboxy-termini can be remote (also referred to herein as “distal”) from the TLR5 recognition site, and moving away from either the amino or carboxy terminus may bring the conjugation site closer to the recognition site and may interfere with TLR5 activity. In the hinge region amino acids about 237 to about 241 of SEQ ID NO: 812, are approximately at the other tip of the “boomerang” and are about the same distance from the TLR5 recognition site as the amino- and carboxy-termini. This site may also be a location that maintains TLR5 recognition.

[0283] Amino acid identity can be taken into consideration for the location of conjugation sites. Polar and charged amino acids (e.g., serine, aspartic acid, lysine) are more likely to be surface exposed and amenable to attachment of an antigen. Hydrophobic amino acids (e.g., valine, phenylalanine) are more likely to be buried and participate in structural interactions and should be avoided.

[0284] Compositions that include flagellin components with cysteine residues or Toll-like Receptor agonist components with cysteine residues activate TLR5 and can be chemically conjugated to antigens.

[0285] The compositions and methods of employing the compositions of the invention can further include a carrier protein. The carrier protein can be at least one member selected from the group consisting of a tetanus toxoid, a Vibrio cholerae toxoid, a diphtheria toxoid, a cross-reactive mutant of diphtheria toxoid, a E. coli B subunit of a heat labile enterotoxin, a tobacco mosaic virus coat protein, a rabies virus envelope protein, a rabies virus envelope glycoprotein, a thyroglobulin, a heat shock protein 60, a keyhole limpet hemocyanin and an early secreted antigen tuberculosis-6.

[0286] The composition comprising a flagellin component that is at least a portion of a flagellin, wherein the flagellin component includes at least one cysteine residue and whereby the flagellin component activates a Toll-like Receptor 5 can include at least one lysine of the flagellin component that has been substituted with at least one member selected from the group consisting of an arginine residue, a serine residue and a histidine residue.

[0287] In an additional embodiment, the invention is a composition comprising a Toll-like Receptor agonist component that is at least a portion of a Toll-like Receptor agonist, wherein the Toll-like Receptor agonist component includes at least one cysteine residue in a position where a cysteine residue does not occur in the native Toll-like Receptor agonist, whereby the Toll-like Receptor agonist component activates a Toll-like Receptor. “Component,” as used herein in reference to a Toll-like Receptor agonist component, means at least part of or the entirety of a Toll-like Receptor agonist.

[0288] In one embodiment, the cysteine residue in the composition comprising a Toll-like Receptor agonist component that is at least a portion of a Toll-like Receptor agonist, wherein the Toll-like Receptor agonist component includes at least one cysteine residue in a position where a cysteine residue does not occur in the native Toll-like Receptor agonist, whereby the Toll-like Receptor agonist component activates a Toll-like Receptor, substitutes for at least one amino acid in a naturally occurring amino acid sequence of a Toll-like Receptor agonist component. The cysteine can substitute for at least one amino acid remote to the Toll-like Receptor recognition site of the Toll-like Receptor agonist component.

[0289] In another embodiment, the Toll-like Receptor agonist component includes at least a portion of a naturally occurring Toll-like Receptor agonist amino acid sequence in combination with a cysteine residue. The cysteine residue in combination with the naturally occurring Toll-like Receptor agonist can be remote to the Toll-like Receptor recognition site of the Toll-like Receptor agonist component.

[0290] The composition comprising a Toll-like Receptor agonist component that is at least a portion of a Toll-like Receptor agonist, wherein the Toll-like Receptor agonist component includes at least one cysteine residue in a position where a cysteine residue does not occur in the native Toll-like Receptor agonist, whereby the Toll-like Receptor agonist component activates a Toll-like Receptor can further include at least a portion of at least one antigen (e.g., an influenza antigen, such as a influenza integral membrane protein antigen, HA, HA1-1, HA1-2, M2, M2e).

[0291] In still another embodiment, the invention is a composition comprising a flagellin component that is at least a portion of a flagellin, wherein at least one lysine of the flagellin component has been substituted with at least one arginine, whereby the flagellin component activates a Toll-like Receptor 5.

[0292] “Substituted,” as used herein in reference to the flagellin, flagellin component, Toll-like Receptor agonist or Toll-like Receptor agonist component, means that at least one amino acid, such as a lysine of the flagellin component, has been modified to another amino acid residue, for example, a conservative substitution (e.g., arginine, serine, histidine) to thereby form a substituted flagellin component or substituted Toll-like Receptor agonist component. The substituted flagellin component or substituted Toll-like Receptor agonist component can be made by generating recombinant constructs that encode flagellin with the substitutions, by chemical means, by the generation of proteins or peptides of at least a portion of the flagellin by protein synthesis techniques, or any combination thereof.

[0293] The lysine residue that is substituted with an amino acid (e.g., arginine, serine, histidine) can be at least one lysine residue selected from the group consisting of lysine 19, 41, 58, 135, 160, 177, 179, 203, 215, 221, 228, 232, 241, 251, 279, 292, 308, 317, 326, 338, 348, 357, 362, 369, 378, 384, 391 and 410 of SEQ ID NO: 812.

[0294] The flagellin can be a S. typhimurium flagellin that includes SEQ ID NO: 816. The lysine residue that is substituted with an amino acid (e.g., arginine, serine, histidine) can be at least one lysine residue selected from the group consisting of lysine 20, 42, 59, 136, 161, 177, 182, 189, 209, 227, 234, 249, 271, 281, 288, 299, 319, 325, 328, 337, 341, 355, 357, 369, 381, 390, 396, 403, 414 and 422 of SEQ ID NO: 816.

[0295] The flagellin can be an E. coli fliC that includes SEQ ID NO: 814. The flagellin can be a S. muenchen that include the includes SEQ ID NO: 813. The flagellin can be a P. aeruginosa flagellin that includes SEQ ID NO: 815. The flagellin can be a Listeria monocytogenes flagellin that includes SEQ ID NO: 820.

[0296] The compositions of the invention can include a flagellin that has lysines substituted in a region adjacent to the motif C of the flagellin, the motif N of the flagellin, both the motif C and the motif N of the flagellin, domain 1 of the flagellin, domain 2 of the flagellin or any combination thereof. Motif C and motif N of flagellin and domain 1 and domain 2 of the flagellin can be involved in activation of TLR5 by the flagellin (Murthy, et al., J. Biol. Chem., 279:5667-5675 (2004)).

[0297] Chemical conjugation of a protein, peptide, or polypeptide to another molecule can be by derivatization of a secondary group, such as a lysine. Certain lysine residues in flagellin are near or in domain 1, the motif C or motif N, motifs can be important in binding of the flagellin to TLR5. For example, lysine residues at amino acids 58, 135, 160 and 410 of SEQ ID NO: 812 may be substituted with at least one member selected from the group consisting of an arginine residue, a serine residue and a histidine residue. Derivatization of such lysine residues to, for example, chemically conjugated antigens to flagellins, may decrease the ability or the binding affinity of the flagellin to TLR5 and, thus, diminish an innate immune response mediated by TLR5. Substitution of at least one lysine residue in a flagellin that may be near to regions of the flagellin that are important in mediating interactions with TLR5 (e.g., motif C, motif N, domain 1) with another amino acid (e.g., arginine, serine, histidine) may preserve or enhance flagellin binding to TLR5. In a particular embodiment, the amino acid substitution is a conservative amino acid substitution with at least one member selected from the group consisting of arginine, serine and histidine. Exemplary commercially available reagents for chemical conjugation are described herein.

[0298] Certain lysine residues in flagellin are in the domain (domain 1) and can be important for activation of TLR5. For example, lysine residues at positions 58, 135, 160 and 410 of SEQ ID NO: 812 are in domain 1. Derivatization of such lysine residues to, for example, chemically conjugated antigens, may decrease TLR5 bioactivity and, thus, diminish an innate immune response mediated by TLR5.

[0299] Lysine residues that can be substituted can include lysine residues implicated in TLR5 activation. Lysine residues in motif N (amino acids 95-108 of SEQ ID NO: 812) and/or motif C (amino acids 441-449 of SEQ ID NO: 812) can be suitable for substitution. Substitution of certain lysine residue in the flagellin (e.g., lysine at amino acid position 19, 41) with, for example, an arginine, serine or histidine, can maintain binding of the flagellin to TLR5 and leave other lysines available for chemical conjugate to another molecule, such as an antigen (e.g., protein) or another molecule, such as another protein, peptide or polypeptide.

[0300] The X-ray crystal structure of the F41 fragment of flagellin from Salmonella typhimurium shows the domain structure of flagellin (Samatey, F. A., et al., Nature 410:321 (2001)). The full length flagellin protein contains 4 domains, designated as D0, D1, D2 and D3. Three of these domains are shown in the crystal structure because the structure was made with a proteolytic fragment of full length flagellin. The amino acid sequences of Salmonella typhimurium flagellin for these regions, numbered relative to SEQ ID NO: 812 are as follows:

[0301] D0 contains the regions A1 through A55 and S451 through R494

[0302] D1 contains the regions N56 through Q176 and T402 through R450

[0303] D2 contains the regions K177 through GI 89 and A284 through A401

[0304] D3 contains the region Y190 though V283

[0305] Exemplary lysine residues of SEQ ID NO: 812 suitable for substitution with, for example, arginine, histidine, or serine, can include:

[0306] D0 contains 2 lysine residues; K19, K41

[0307] D1 contains 4 lysine residues; K58, K135, K160 and K410

[0308] D2 contains 14 lysine residues at positions 177, 179, 292, 308, 317, 326, 338, 348, 357, 362, 369, 378, 384, 391

[0309] D3 contains 8 lysine residues at positions 203, 215, 221, 228, 232, 241, 251, 279

[0310] Exemplary lysine residues suitable for substitution include lysines at positions 58, 135, 160 and 410 of SEQ ID NO: 812 (Jacchieri, S. G., et. al., J. Bacteriol. 185:4243 (2003); Donnelly, M. A., et al., J. Biol. Chem. 277:40456 (2002)). The sequences were obtained from the Swiss-Prot Protein Knowledge base located online at http://us.expasy.org/sprot/. Lysine residues that can be modified are indicated with a *.

[0311] Exemplary lysine residues of SEQ ID NO: 816 suitable for substitution can include:

[0312] D0—with two lysines at positions 20, 42;

[0313] D1—with five lysines at positions 59, 136, 161, 414, 422;

[0314] D2—with sixteen lysines at positions 177, 182, 189, 299, 319, 325, 328, 337, 341, 355, 357, 369, 381, 390, 396, 403 and

[0315] D3—with seven lysines at positions 209, 227, 234, 249, 271, 281, 288.

[0316] In a further embodiment, the invention is a composition comprising a flagellin component that is at least a portion of a flagellin, wherein at least one lysine of the flagellin component has been substituted with at least one histidine residue, whereby the flagellin component activates a Toll-like Receptor 5.

[0317] In yet another embodiment, the invention is a method of stimulating an immune response in a subject, comprising the step of administering to the subject a composition that includes a flagellin component that is at least a portion of a flagellin, wherein the flagellin component includes at least one cysteine residue and whereby the flagellin component activates a Toll-like Receptor 5.

[0318] In another embodiment, the invention is a method of stimulating protective immunity in a subject, comprising the step of administering to the subject a composition that includes a flagellin component that is at least a portion of a flagellin, wherein the flagellin component includes at least one cysteine residue and whereby the flagellin component activates a Toll-like Receptor 5.

[0319] In yet another embodiment, the invention is a method of stimulating protective immunity in a subject, comprising the step of administering to the subject a composition that includes a flagellin component that is at least a portion of a flagellin, wherein at least one lysine of the flagellin component has been substituted with at least one arginine, whereby the flagellin component activates a Toll-like Receptor 5.

[0320] In still another embodiment, the invention is a method of stimulating an immune response in a subject, comprising the step of administering to the subject a composition that includes a flagellin component that is at least a portion of a flagellin, wherein at least one lysine of the flagellin component has been substituted with at least one serine residue, whereby the flagellin component activates a Toll-like Receptor 5.

[0321] In another embodiment, the invention is a method of stimulating a protective immune response in a subject, comprising the step of administering to the subject a composition that includes a flagellin component that is at least a portion of a flagellin, wherein at least one lysine of the flagellin component has been substituted with at least one serine residue, whereby the flagellin component activates a Toll-like Receptor 5.

[0322] In an additional embodiment, the invention is a method of stimulating an immune response in a subject, comprising the step of administering to the subject a composition that includes a flagellin component that is at least a portion of a flagellin, wherein at least one lysine of the flagellin component has been substituted with at least one histidine residue, whereby the flagellin component activates a Toll-like Receptor 5.

[0323] In a further embodiment, the invention is a method of stimulating protective immunity in a subject, comprising the step of administering to the subject a composition that includes a flagellin component that is at least a portion of a flagellin, wherein at least one lysine of the flagellin component has been substituted with at least one histidine residue, whereby the flagellin component activates a Toll-like Receptor 5.

[0324] Another embodiment of the invention is a method of stimulating an immune response in a subject, comprising the step of administering to the subject a composition that includes a Toll-like Receptor agonist component that is at least a portion of a Toll-like Receptor agonist, wherein the Toll-like Receptor agonist component includes at least one cysteine residue in a position where a cysteine residue does not occur in the native Toll-like Receptor agonist, whereby the Toll-like Receptor agonist component activates a Toll-like Receptor agonist.

[0325] Another embodiment of the invention is a method of stimulating a protective immunity in a subject, comprising the step of administering to the subject a composition that includes a Toll-like Receptor agonist component that is at least a portion of a Toll-like Receptor agonist, wherein the Toll-like Receptor agonist component includes at least one cysteine residue in a position where a cysteine residue does not occur in the native Toll-like Receptor agonist, whereby the Toll-like Receptor agonist component activates a Toll-like Receptor agonist.

[0326] In yet another embodiment, the invention is a composition comprising an antigen component that includes at least a portion of a hemagglutinin maturational cleavage site and an agonist component that includes a Toll-like Receptor agonist (e.g., at least one member selected from the group consisting of a Toll-like Receptor 1 agonist, a Toll-like Receptor 3 agonist, a Toll-like Receptor 5 agonist, a Toll-like Receptor 6 agonist, a Toll-like Receptor 7 agonist and a Toll-like Receptor 9 agonist) wherein the Toll-like Receptor agonist is not a Toll-like Receptor 2 agonist (e.g., the outer membrane protein complex (OMPC), such as OMPC of Neiserria meningitides). The hemagglutinin maturational cleavage site can include at least one member selected from the group consisting of an influenza A hemagglutinin maturational cleavage site, an influenza B hemagglutinin maturational cleavage site and an influenza C hemagglutinin maturational cleavage site.

[0327] In one embodiment, the antigen component and the agonist component of the compositions of the invention can be components of a fusion protein. In another embodiment, the antigen component is chemically conjugated to the agonist component. The agonist component includes a composition comprising a flagellin component that is at least a portion of a flagellin, wherein the flagellin component includes at least one cysteine residue and whereby the flagellin component activates a Toll-like Receptor 5. The antigen component further includes at least a portion of a matrix 2 protein, which can further include a second agonist component that includes at least a portion of a second Toll-like Receptor agonist (e.g., at least a portion of at least one member selected from the group consisting of a Toll-like Receptor 2 agonist, a Toll-like Receptor 3 agonist, a Toll-like Receptor 4 agonist, a Toll-like Receptor 5 agonist, a Toll-like Receptor 6 agonist, a Toll-like Receptor 7 agonist and a Toll-like Receptor 9 agonist). The matrix-2 protein can be fused to the second agonist component or chemically conjugated to a second agonist component.

[0328] An “antigen component,” as used herein, refers to a part or the entirety of an antigen.

[0329] An “agonist component” as used herein, refers to a part or the entirety of an agonist, such as a Toll-like Receptor agonist.

[0330] In an additional embodiment, the invention is a method of stimulating an immune response in a subject, comprising the step of administering to the subject a composition comprising an antigen component that includes at least a portion of a hemagglutinin maturational cleavage site and an agonist component that includes a Toll-like Receptor agonist, wherein the Toll-like Receptor agonist is not a Toll-like Receptor 2 agonist.

[0331] In a further embodiment, the invention is a method of stimulating protective immunity in a subject, comprising the step of administering to the subject a composition comprising an antigen component that includes at least a portion of a hemagglutinin maturational cleavage site and an agonist component that includes a Toll-like Receptor agonist, wherein the Toll-like Receptor agonist is not a Toll-like Receptor 2 agonist.

[0332] In yet another embodiment, the invention is a composition that includes at least a portion of a HA antigen (e.g., the maturational cleavage site) that is fused (e.g., recombinantly) to or chemically conjugated to at least of portion of a hinge region of a flagellin, a flagellin component or in a flagellin in which the hinge region has been deleted; and at least a portion of an M2e protein that is fused (e.g., recombinantly) to or chemically conjugated to a flagellin or a flagellin component, for example, at the amino- or carboxy-terminus of the flagellin or the flagellin component (See, for example, FIG. 77).

[0333] In an additional embodiment, the invention includes a protein, peptide polypeptide having at least about 70%, at least about 75%, at least about 80%, at least about 85%, at least about 90%, at least about 95%, at least about 98% and at least about 99% sequence identity to the proteins, polypeptides and peptides of the invention.

[0334] The percent identity of two amino acid sequences (or two nucleic acid sequences) can be determined by aligning the sequences for optimal comparison purposes (e.g., gaps can be introduced in the sequence of a first sequence). The amino acid sequence or nucleic acid sequences at corresponding positions are then compared, and the percent identity between the two sequences is a function of the number of identical positions shared by the sequences (i.e., % identity=# of identical positions/total # of positions×100). The length of the protein or nucleic acid encoding can be aligned for comparison purposes is at least 30%, preferably, at least 40%, more preferably, at least 60%, and even more preferably, at least 70%, 75%, 80%, 85%, 90%, 95%, 98%, 99% or 100%, of the length of the reference sequence, for example, the nucleic acid sequence of a protein portion of HA (e.g., HA1-1, HA1-2), fusion protein, antigen, or polypeptide.

[0335] The actual comparison of the two sequences can be accomplished by well-known methods, for example, using a mathematical algorithm. A preferred, non-limiting example of such a mathematical algorithm is described in Karlin et al. (Proc. Natl. Acad. Sci. USA, 90:5873-5877 (1993), the teachings of which are hereby incorporated by reference in its entirety). Such an algorithm is incorporated into the BLASTN and BLASTX programs (version 2.2) as described in Schaffer et al. (Nucleic Acids Res., 29:2994-3005 (2001), the teachings of which are hereby incorporated by reference in its entirety). When utilizing BLAST and Gapped BLAST programs, the default parameters of the respective programs (e.g., BLASTN; available at the Internet site for the National Center for Biotechnology Information) can be used. In one embodiment, the database searched is a non-redundant (NR) database, and parameters for sequence comparison can be set at: no filters; Expect value of 10; Word Size of 3; the Matrix is BLOSUM62; and Gap Costs have an Existence of 11 and an Extension of 1.

[0336] Another mathematical algorithm employed for the comparison of sequences is the algorithm of Myers and Miller, CABIOS (1989), the teachings of which are hereby incorporated by reference in its entirety. Such an algorithm is incorporated into the ALIGN program (version 2.0), which is part of the GCG (Accelrys, San Diego, Calif.) sequence alignment software package. When utilizing the ALIGN program for comparing amino acid sequences, a PAM120 weight residue table, a gap length penalty of 12, and a gap penalty of 4 is used. Additional algorithms for sequence analysis are known in the art and include ADVANCE and ADAM as described in Torellis and Robotti (Comput. Appl. Biosci., 10: 3-5 (1994), the teachings of which are hereby incorporated by reference in its entirety); and FASTA described in Pearson and Lipman (Proc. Natl. Acad. Sci USA, 85: 2444-2448 (1988), the teachings of which are hereby incorporated by reference in its entirety).

[0337] The percent identity between two amino acid sequences can also be accomplished using the GAP program in the GCG software package (Accelrys, San Diego, Calif.) using either a Blossom 63 matrix or a PAM250 matrix, and a gap weight of 12, 10, 8, 6, or 4 and a length weight of 2, 3, or 4. In yet another embodiment, the percent identity between two nucleic acid sequences can be accomplished using the GAP program in the GCG software package (Accelrys, San Diego, Calif.), using a gap weight of 50 and a length weight of 3.

[0338] The nucleic acid sequence encoding a protein portion of HA, polypeptide or fusion proteins of the invention and polypeptides of the invention can include nucleic acid sequences that hybridize to nucleic acid sequences or complements of nucleic acid sequences of the invention, for example, SEQ ID NOS: 53-58, 64, 68, 71, 72, 73, 76, 78, 80, 84, 87, 104, 107, 110, 111, 112, 115, 116, 117, 119, 120, 121, 122, 123, 124, 125, 126, 127, 128, 129, 130, 131, 132, 133, 137, 139, 142, 143, 146, 147, 150, 167, 184, 185, 186, 187, 188, 189, 190, 191, and 192); and nucleic acid sequences that encode amino acid sequences and fusion proteins of the invention (e.g., SEQ ID NOS: 89-92, 95, 151-160, 177, 209, 210 and 211) under selective hybridization conditions (e.g., highly stringent hybridization conditions). As used herein, the terms “hybridizes under low stringency,” “hybridizes under medium stringency,” “hybridizes under high stringency,” or “hybridizes under very high stringency conditions,” describe conditions for hybridization and washing of the nucleic acid sequences. Guidance for performing hybridization reactions, which can include aqueous and nonaqueous methods, can be found in Aubusel, F. M., et al., Current Protocols in Molecular Biology, John Wiley & Sons, N.Y. (2001), the teachings of which are hereby incorporated herein in its entirety.

[0339] For applications that require high selectivity, relatively high stringency conditions to form hybrids can be employed. In solutions used for some membrane based hybridizations, addition of an organic solvent, such as formamide, allows the reaction to occur at a lower temperature. High stringency conditions are, for example, relatively low salt and/or high temperature conditions. High stringency are provided by about 0.02 M to about 0.10 M NaCl at temperatures of about 50° C. to about 70° C. High stringency conditions allow for limited numbers of mismatches between the two sequences. In order to achieve less stringent conditions, the salt concentration may be increased and/or the temperature may be decreased. Medium stringency conditions are achieved at a salt concentration of about 0.1 to 0.25 M NaCl and a temperature of about 37° C. to about 55° C., while low stringency conditions are achieved at a salt concentration of about 0.15 M to about 0.9 M NaCl, and a temperature ranging from about 20° C. to about 55° C. Selection of components and conditions for hybridization are well known to those skilled in the art and are reviewed in Ausubel et al. (1997, Short Protocols in Molecular Biology, John Wiley & Sons, New York N.Y., Units 2.8-2.11, 3.18-3.19 and 4-64.9).

[0340] A “subject,” as used herein, can be a mammal, such as a primate or rodent (e.g., rat, mouse). In a particular embodiment, the subject is a human.

[0341] An “effective amount,” when referring to the amount of a composition and fusion protein of the invention, refers to that amount or dose of the composition and fusion protein, that, when administered to the subject is an amount sufficient for therapeutic efficacy (e.g., an amount sufficient to stimulate an immune response in the subject). The compositions and fusion proteins of the invention can be administered in a single dose or in multiple doses.

[0342] The methods of the present invention can be accomplished by the administration of the compositions and fusion proteins of the invention by enteral or parenteral means. Specifically, the route of administration is by oral ingestion (e.g., drink, tablet, capsule form) or intramuscular injection of the composition and fusion protein. Other routes of administration as also encompassed by the present invention including intravenous, intradermal, intraarterial, intraperitoneal, or subcutaneous routes, and nasal administration. Suppositories or transdermal patches can also be employed.

[0343] The compositions and fusion proteins of the invention can be administered ex vivo to a subject's autologous dendritic cells. Following exposure of the dendritic cells to the composition and fusion protein of the invention, the dendritic cells can be administered to the subject.

[0344] The compositions and fusion proteins of the invention can be administered alone or can be coadministered to the patient. Coadministration is meant to include simultaneous or sequential administration of the composition, fusion protein or polypeptide of the invention individually or in combination. Where the composition and fusion protein are administered individually, the mode of administration can be conducted sufficiently close in time to each other (for example, administration of the composition close in time to administration of the fusion protein) so that the effects on stimulating an immune response in a subject are maximal. It is also envisioned that multiple routes of administration (e.g., intramuscular, oral, transdermal) can be used to administer the compositions and fusion proteins of the invention.

[0345] The compositions and fusion proteins of the invention can be administered alone or as admixtures with conventional excipients, for example, pharmaceutically, or physiologically, acceptable organic, or inorganic carrier substances suitable for enteral or parenteral application which do not deleteriously react with the extract. Suitable pharmaceutically acceptable carriers include water, salt solutions (such as Ringer's solution), alcohols, oils, gelatins and carbohydrates such as lactose, amylose or starch, fatty acid esters, hydroxymethycellulose, and polyvinyl pyrrolidine. Such preparations can be sterilized and, if desired, mixed with auxiliary agents such as lubricants, preservatives, stabilizers, wetting agents, emulsifiers, salts for influencing osmotic pressure, buffers, coloring, and/or aromatic substances and the like which do not deleteriously react with the compositions, fusion proteins or polypeptides of the invention. The preparations can also be combined, when desired, with other active substances to reduce metabolic degradation. The compositions and fusion proteins of the invention can be administered by is oral administration, such as a drink, intramuscular or intraperitoneal injection or intranasal delivery. The compositions and fusion proteins alone, or when combined with an admixture, can be administered in a single or in more than one dose over a period of time to confer the desired effect (e.g., alleviate prevent viral infection, to alleviate symptoms of virus infection, such as influenza or flaviviral infection).

[0346] When parenteral application is needed or desired, particularly suitable admixtures for the compositions and fusion proteins are injectable, sterile solutions, preferably oily or aqueous solutions, as well as suspensions, emulsions, or implants, including suppositories. In particular, carriers for parenteral administration include aqueous solutions of dextrose, saline, pure water, ethanol, glycerol, propylene glycol, peanut oil, sesame oil, polyoxyethylene-block polymers, and the like. Ampules are convenient unit dosages. The compositions, fusion proteins or polypeptides can also be incorporated into liposomes or administered via transdermal pumps or patches. Pharmaceutical admixtures suitable for use in the present invention are well-known to those of skill in the art and are described, for example, in Pharmaceutical Sciences (17th Ed., Mack Pub. Co., Easton, Pa.) and WO 96/05309 the teachings of which are hereby incorporated by reference.

[0347] The compositions and fusion proteins of the invention can be administered to a subject on a support that presents the compositions, fusion proteins and polypeptides of the invention to the immune system of the subject to generate an immune response in the subject. The presentation of the compositions, fusion proteins and polypeptides of the invention would preferably include exposure of antigenic portions of the viral protein to generate antibodies. The components (e.g., PAMP and a viral protein) of the compositions, fusion proteins and polypeptides of the invention are in close physical proximity to one another on the support. The compositions and fusion proteins of the invention can be attached to the support by covalent or noncovalent attachment. Preferably, the support is biocompatible. “Biocompatible,” as used herein, means that the support does not generate an immune response in the subject (e.g., the production of antibodies). The support can be a biodegradable substrate carrier, such as a polymer bead or a liposome. The support can further include alum or other suitable adjuvants. The support can be a virus (e.g., adenovirus, poxvirus, alphavirus), bacteria (e.g., Salmonella) or a nucleic acid (e.g., plasmid DNA).

[0348] The dosage and frequency (single or multiple doses) administered to a subject can vary depending upon a variety of factors, including prior exposure to an antigen, a viral protein, the duration of viral infection, prior treatment of the viral infection, the route of administration of the composition, fusion protein or polypeptide; size, age, sex, health, body weight, body mass index, and diet of the subject; nature and extent of symptoms of viral exposure, viral infection and the particular viral responsible for the infection (e.g., a flavivirus, influenza virus), or treatment or infection of an other antigen, such as an influenza antigen, kind of concurrent treatment, complications from the viral exposure, viral infection or exposure or other health-related problems. Other therapeutic regimens or agents can be used in conjunction with the methods and compositions, fusion proteins or polypeptides of the present invention. For example, the administration of the compositions and fusion proteins can be accompanied by other viral therapeutics or use of agents to treat the symptoms of a condition associated with or consequent to exposure to the antigen, such as flavivirus infection (e.g., high fever, numbness, DHF, meningoencephalitis) or influenza infection, for example. Adjustment and manipulation of established dosages (e.g., frequency and duration) are well within the ability of those skilled in the art.

[0349] Influenza viruses are single-stranded RNA viruses that belong to the viral family Orthomyxoviridae. Influenza viruses are divided into three types (A, B, C) determined by the antigenic differences in ribonucleoprotein (RNP) and matrix (M) antigens of the viruses. Influenza A virus naturally infects humans and several other mammalian species, including swine and horses, and a wide variety of avian species, and causes epidemics and pandemics in the human population. Influenza B virus appears to naturally infect only humans and can cause epidemics in humans. Influenza C virus has been isolated from humans and swine, but generally does not occur in epidemics and usually results in mild disease in humans.

[0350] Mature influenza virions are enveloped with a pleomorphic structure ranging in diameter from 80 to 120 nm. The single-stranded RNA genome is closely associated with a helical nucleoprotein and is present in seven (influenza C) or eight (influenza A and B) separate segments of ribonucleoprotein (RNP), each of which has to be present for successful replication of the virus. The segmented genome is enclosed within an outer lipoprotein envelope. Matrix protein 1 (MP1 or also referred to herein as “M1”) lines the inside of the outer lipoprotein envelope and is bound to the RNP.

[0351] Hemagglutinin (HA) is a surface glycoprotein on a virus (e.g., an influenza virus) that is responsible for binding to N-AcetylNeuraminic Acid (NeuNAc; also referred to herein as “sialic acid”) on host cells and subsequent fusion of viral and host membranes. HA acquired its name by virtue of its ability to cause red blood cells to clump, or agglutinate. Influenza HA is a trimer consisting of the three monomeric (HA0) subunits. HA performs two critical functions during the infection process: binding to a cell surface sialyloligosaccharide receptor and fusion of virus and host cell membrane. Following binding of the HA trimer to the plasma membrane of a host cell, the host cell membrane engulfs the virus in an endosome and attempts to digest the contents of the endosome by acidifying its interior and transferring it to a lysosome in the host cell. However, the acidic environment of the lysosome destabilizes HA, resulting in partial unfolding of HA0 which exposes a protease-sensitive site (the maturaional cleaveage site) that is cleaved by a host protease to form HA1 and HA2 subunits which are connected by a single disulfide bond (Wiley, D. C., et al., Annu. Rev. Biochem. 56:365-394 (1987)). Cleavage occurs at a specific amino acid residue and generates a hydrophobic amino terminus for the HA2 subunit. This hydrophobic terminus of HA2 mediates fusion between the viral envelope and the endosomal membrane of the host cell and releases the contents of the virion into the cytoplasm of the cell, a process known as uncoating. Thus, cleavage of the HA polypeptide is a requirement for infectivity.

[0352] The crystal structure of several viral hemagglutinins has been determined (see, for example, Wilson, I. A., et al., Nature 289:366-373 (1981); Chen, J., et al., Cell 95:409-417 (1998); Ha, Y., et al., The EMBO Journal 21: 865-875 (2002); Russell, R. J., et al., Virology 325:287-296 (2004); and Cox, N. J., et al., In: Toply and Wilson's Microbiology and Microbial Infections, eds. B. W. J. Mathy, et al., Vol. 1 (9^{th} ed.) New York, N.Y., Oxford Univ. Press, Ch. 32, p. 634 (1998)). X-ray crystallographic structures show that HA is folded into two structural components or domains—a globular head and a fibrous stalk (see, for example, FIG. 1). The globular head includes HA1, including that part of HA1 that binds to sialic acid (also referred to as the “receptor binding site or domain” or “sialic acid binding site or domain”), and antiparallel β-sheets. The fibrous stalk is more proximal to the viral membrane and consists of all of HA2 and part of HA1, including the cleavage site between HA1 and HA2.

[0353] There are fifteen known subtypes of Influenza A HA (H1-H15) that share between about 40 to about 60% sequence identity (World Health Organization BULL. World Health Organ., 58:585-591 (1980)). Influenza viruses containing all 15 HA subtypes have been isolated from avian species (H5, H7, and H9), equine (H3 and H7), seals (H3, H4 and H7), whales (H1 and H13) and swine (H1, H3, and H9). Subtypes of influenza A virus are generally named according to the particular antigenic determinants of HA (H, 15 major types) and neuraminidase (N, about 9 major types). For example, subtypes include influenza A (H2N1), A(H3N2), A(H5N1), A(H7N2), A(H9N2), A(H1/H0), A(H3/H0) and A(H5/H0). In the last century, three subtypes of influenza A resulted in pandemics: H1 in 1918 and 1977; H2 in 1957 and H3 in 1968. In 1997, an H5 avian virus and in 1999, an H9 virus resulted in outbreaks of respiratory disease in Hong Kong. HA from influenza type B viruses have been isolated from humans and seals and are not divided into subtypes.

[0354] A host infected with influenza can mount an antibody response to the globular head of HA that protects that host from subsequent infection with the same strain of virus by blocking the interaction between HA and the host cell, i.e., neutralizing the infectivity of the virus. Due to the low fidelity and high rate of influenza RNA replication, the virus is constantly experiencing minor mutations in the HA gene that preserve the globular head structure and host cell interaction, but may allow progeny virus to escape immune surveillance. These point mutations are referred to as “antigenic drift.” In addition, if a single host is simultaneously infected with two different strains of influenza A, a new subtype of virus may emerge as a result of reassortment, or the exchange of the RNA segments, or genes, between different strains of influenza A viruses. The viruses emerging from reassortment present the human immune system with a new antigenic experience that usually results in high morbidity and mortality. This type of drastic antigenic change is known as “antigenic shift.” Since type B influenza viruses circulate almost exclusively in humans, these viruses cannot undergo reassortment with animal strains and, thus, are changed only by antigenic drift.

[0355] Immunity to HA can reduce the likelihood of infection and severity of disease if infection does occur. HA is an important antigenic target and the efficacy of vaccines depends on the antigenic match between the vaccine strain and the circulating strain. Since the hemagglutinin protein readily undergoes antigenic shift and drift in order to evade the host's immune defense, traditional vaccines must be based on currently circulating influenza strains and annually updated. Annual updates of influenza vaccines are not only costly they also require significant amounts of production time and manufacturing infrastructure. A vaccine composition based on invariant regions of the virus may provide broadly cross-reactive protection.

[0356] In contrast to the globular head of HA, changes in amino acid residues surrounding the maturational cleavage site of HA are limited due to functional constraints. Amino acid residues surrounding the HA maturational cleavage site influence recognition and therefore cleavability of the site by the host protease. Since the virus does not code for the protease, changes in the amino acid residues surrounding the maturational cleavage site are restricted. As a consequence a peptide of about 20 amino acids spanning the maturational cleavage site remains genetically stable across influenza viruses of the same HA subtype (WO 2004/080403; Bianchi, et al. J Virol 79:7380-7388 (2005)) or as branched peptides (Horvath, et al Immunol Letters 60:127-136 (1998), Nagy, et al Scand J Immunol 40:281-291 (1994)).

[0357] A second highly conserved antigen of influenza A is the ectodomain of the matrix 2 protein (M2e). M2 is a 97-amino acid protein expressed at low levels in mature virions and much higher levels on infected cells. The M2 protein forms a homotetramer that functions as an ion channel which is critical to the replication of the virus, thus, mutations in M2e are not as well tolerated as mutations in HA. The 24-amino acid ectodomain (M2e) is highly conserved across multiple influenza A strains. In mammals, M2e is poorly immunogenic in its native form. Antibodies to M2e can confer passive protection in animal models of influenza A infection (Treanor, J. J., et al., J Virol 64:1375 (1990); Liu, W. P., et al., Immunol Lett 93:131 (2004)), not by neutralizing the virus and preventing infectivity, but by killing infected cells and disrupting the viral life cycle (Zebedee, S. L., et al., J. Virol. 62:2762 (1998); Jegerlehner, A. N., et. al., J Immunol 172:5598 (2004)), which may be by antibody-dependent NK cell activity (Jegerlehner, A. N., et al., J Immunol 172:5598 (2004)). Composition that include M2e proteins may limit the severity of influenza A disease while allowing the host immune response to develop adaptive immunity to the dominant neutralizing influenza antigen, HA.

[0358] Strategies to manage infection and illness consequent to influenza viral infection have not changed significantly in the past four decades. Due to the seasonal nature of influenza disease, the distinct types of influenza virus (A and B) that threaten the human population, and the genetic instability of each type, it is necessary to reformulate a multivalent vaccine each year, based on epidemiological prediction of strains likely to be circulating in the human population in the upcoming flu season. The vaccine is produced from stocks of selected prototype viral strains grown in embryonated chicken eggs. Thus, the current strategy has several limitations that include: (a) dependence on uncertain prediction of circulating strains; (b) dependence on the ability to grow the appropriate strains in chicken eggs; (c) the egg-based production system carries risks of product contamination; (d) the product produced in eggs cannot be used in individuals with egg allergies; and (e) a significant risk that the typical multivalent vaccine will not confer protection against a pandemic strain of virus to which the human population has no pre-existing immunity.

[0359] The dominant protective component of the currently-available influenza vaccine is the viral hemagglutinin (HA). A more effective vaccine may include not only strain-specific HA, but cross-protective antigens, such as M2e and maturational cleavage site. A vaccine production process that is more reliable, economical, and scaleable than the current egg-based method is also preferable. The compositions, fusion proteins and polypeptides of the invention provide compositions that include HA, M2e, and maturational cleavage site of influenza proteins, which can stimulate an immune response, specifically, a protective immune response to several influenza antigens in subject.

[0360] The teachings of all patents, published applications and references cited herein are incorporated by reference in their entirety.

### EXEMPLIFICATION

### Example 1

### Design of Portions of a Naturally Occurring Hemagglutinin of Influenza A

### Materials and Methods

[0361] Design of the HA1-1, 1-2 and 1-3 globular head constructs for A/Puerto Rico/8/34 (H1N1). Influenza strain A/Puerto Rico/8/34 (PR8) is a well-characterized mouse-adapted strain of influenza A virus. The published crystal structure of the mature PR8 HA (SEQ ID NO: 1) (Gamblin et al. 2005. Science 303:1838-1842; PDB accession number 1RU7) was used in combination with the Molecular Modeling Database to determine the boundaries for three PR8 globular head constructs. The complete list of solved crystal structures for influenza A hemagglutinin molecules can be found in the Protein Data Bank (PDB) or National Center for Biotechnology Information (NCBI) Structure website (http://www.ncbi.nlm.nih.gov/Structure).

[0362] The three dimensional crystal structure for the PR8 HA was viewed using the Cn3D program within the NCBI website. The trimeric HA molecule has the shape of a mushroom. The globular head refers to the portion of the hemagglutinin molecule at the top that resembles the mushroom head, and the coiled-coil stalk refers to the bottom part of the molecule that resembles the stalk of the mushroom (FIG. 1). The globular head contains the substrate binding site that binds to sialic acid on the cell surface, and therefore is important for viral entry. In addition, the majority of neutralizing antibodies epitopes are located near and around this receptor binding site, making the globular head a good target for protective vaccines. The globular head contains most of the HA1 peptide including residues numbered from E51 to K327 in PR8 for example.

[0363] The monomeric structure of PR8 chain A, which encompasses the globular head, was used to guide the design of the PR8 HA1-1, 1-2 and 1-3 constructs (FIG. 1). The HA constructs were designed with domain boundaries within the globular head so that when the molecule is expressed in a host cell, the encoded protein it may spontaneously fold or refolded in vitro to mimic the native conformation. A structural domain (also referred to herein as “domains”) within a protein is an element of overall structure that is self-stabilizing and often folds independently of the rest of the protein chain. Most domains can be classified into folds. Many domains are not unique to the proteins produced by one gene or one gene family but instead appear in a variety of proteins. Domains often are named and singled out because they play an important role in the biological function of the protein to which they belong; for example, the substrate binding domain of hemagglutinin can participate in binding to the substrate. Because domains can be self-stabilizing, domains can be swapped between one protein and another or associated to other carrier proteins by genetic engineering to make chimera proteins. A domain may be composed of none, one, or many structural motifs. In the cases of influenza hemagglutinin construct design, many structural motifs are preserved. The boundary selection is guided by known crystal structures. In the case of PR8, residues from E51 to K327 (SEQ ID NO: 1) fold into a compact structure that distinguishes from the rest of the HA molecules, thus is the region of focus to design HA constructs.

[0364] Design of the HA1-1, 1-2 and 1-3 globular head constructs for A/Viet Nam/1203/2004 (H5N1). The HA structure used as a reference in the design of the Viet Nam/1203/2004 (H5N1) globular head constructs is described in Stevens et al, 2006, Science 312:404-410 (MMDB number 38730; PDB accession number 2FK0). As described for the PR8 globular head constructs above, the published crystal structure of the mature A/Viet Nam/1203/2004 HA (SEQ ID NO: 2) was used in combination with the Molecular Modeling Database to determine the domain boundaries for three Viet Nam globular head constructs. The same structural criteria for preservation of secondary and tertiary structure for the structural domain were applied to the design of the Viet Nam constructs. While different hemagglutinin molecules can differ in the nature or number of residues that comprise the hemagglutinin molecule; the overall structure is remarkably similar. Thus, design of the domain boundaries for the Viet Nam globular head constructs required placement of the boundaries at structurally equivalent but numerically different positions with in the HA molecule.

[0365] Design of the HA1-1, 1-2 and 1-3 globular head constructs for A/Indonesia/5/2005 (H5N1). The crystal structure for the Indonesia HA has not been solved. In general, when the crystal structure for a given HA molecule has not been solved, the available structure with the highest sequence identity can be used to guide the construct design. In the case of the design of the Indonesia globular head construct, the closest structure available is the A/Viet Nam/1203/2004 (Stevens et al. 2006. Science 312:404-410; MMDB number 38730; PDB Accession number 2FK0), which is of the same subtype as A/Indonesia/5/2005.

[0366] To design globular head constructs for this HA, the primary sequence of the Indonesia HA (SEQ ID NO: 3) was first aligned with A/Viet Nam/1203/2004 HA (H5VN; SEQ ID NO: 2) molecule (primary sequence identity: 96.13%). The primary sequence alignment for A/Viet Nam/1203/2004 HA (H5VN; SEQ ID NO: 2) and A/Indonesian/5/2005 (H5IN; SEQ ID NO: 3) was conducted using CLUSTALW and is shown below, where (*) asterisk=identity, (:) colon=conservative substitution; (.) period=weakly conservative substitution; and (space)=divergent substitution.

| | |
|---|---|
| | 50 |
| H5IN | MEKIVLLLAIVSLVKSDQICIGYHANNSTEQVDTIMEKNVTVTHAQDILE |
| H5VN | MEKIVLLFAIVSLVKSDQICIGYHANNSTEQVDTIMEKNVTVTHAQDILE |
| | *******:******************************************** |
| | 100 |
| H5IN | KTHNGKLCDLDGVKPLILRDCSVAGWLLGNPMCDEFINVPEWSYIVEKAN |
| H5VN | KKHNGKLCDLDGVKPLILRDCSVAGWLLGNPMCDEFINVPEWSYIVEKAN |
| | *.************************************************ |
| | 150 |
| H5IN | PTNDLCYPGSFNDYEELKHLLSRINHFEKIQIIPKSSWSDHEASSGVSSA |
| H5VN | PVNDLCYPGDFNDYEELKHLLSRINHFEKIQIIPKSSWSSHEASLGVSSA |
| | *.*******.*****************************.**** ***** |
| | 200 |
| H5IN | CPYLGSPSFFRNVVWLIKKNSTYPTIKKSYNNTNQEDLLVLWGIHHPNDA |
| H5VN | CPYQGKSSFFRNVVWLIKKNSTYPTIKRSYNNTNQEDLLVLWGIHHPNDA |
| | *** *..********************:********************** |
| | 250 |
| H5IN | AEQTRLYQNPTTYISIGTSTLNQRLVFKIATRSKVNGQSGRMEFFWTILK |
| H5VN | AEQTKLYQNPTTYISVGTSTLNQRLVPRIATRSKVNGQSGRMEFFWTILK |
| | ****:**********:***********:********************** |
| | 300 |
| H5IN | PNDAINFESNGNFIAPEYAYKIVKKGDSAIMKSELEYGNCNTKCQTPMGA |
| H5VN | PNDAINFESNGNFIAPEYAYKIVKKGDSTIMKSELEYGNCNTKCQTPMGA |
| | ****************************:********************* |
| | 350 |
| H5IN | INSSMPFHNIHPLTIGECPKYVKSNRLVLATGLRNSPQRESRRKKRGLFG |
| H5VN | INSSMPFHNIHPLTIGECPKYVKSNRLVLATGLRNSPQRESRRKKRGLFG |
| | **************************************** ********* |
| | 400 |
| H5IN | AIAGFIEGGWQGMVDGWYGYHHSNEQGSGYAADKESTQKAIDGVTNKVNS |
| HSVN | AIAGFIEGGWQGMVDGWYGYHHSNEQGSGYAADKESTQKAIDGVTNKVNS |
| | ************************************************** |
| | 450 |
| H5IN | IIDKMNTQFEAVGREFNNLERRIENLNKKMEDGFLDVWTYNAELLVLMEN |
| H5VN | IIDKMNTQFEAVGREFNNLERRIENLNKKMEDGFLDVWTYNAELLVLMEN |
| | ************************************************** |
| | 500 |
| H5IN | ERTLDFHDSNVKNLYDKVRLQLRDNAKELGNGCFEFYHKCDNECMESIRN |
| H5VN | ERTLDFHDSNVKNLYDKVRLQLRDNAKELGNGCFEFYHKCDNECMESVRN |
| | ***********************************************:** |
| | 550 |
| H5IN | GTYNYPQYSEEARLKREEISGVKLESIGTYQILSIYSTVASSLALAIMMA |
| H5VN | GTYDYPQYSEEARLKREEISGVKLESIGIYQILSIYSTVASSLALAIMVA |
| | ***:************************ *******************:* |
| | 568 |
| H5IN | GLSLWMCSNGSLQCRICI (SEQ ID NO:3) |
| H5VN | GLSLWMCSNGSLQCR--- (SEQ ID NO:2) |
| | *************** |

[0367] Design of the HA1-1, 1-2 and 1-3 globular head constructs for A/New Calcdonia/20/1999 (H1N1). The crystal structure for the New Calcdonia HA has not been solved. To design the globular head constructs for this HA, the primary sequence of the New Calcdonia HA (H1NC; SEQ ID NO: 4) was first aligned with two closely related HA molecules of the same subtype (primary sequence homology >85%) for which the structures have been resolved, specifically the H1N1 1918 virus (same as A/South Carolina/1/18) (SEQ ID NO: 5) and the A/Puerto Rico/8/34 virus (H1PR8; SEQ ID NO: 1) (Gamblin, et al., Science 303, 1838-42 (2004). A/South Carolina/1/18: MMDB number 26943, PDB accession number: 1RUZ and PR8, MMDB number: 26941 and PDB accession number: 1RU7). The primary sequence alignment was conducted using CLUSTALW and is shown below, where (*) asterisk=identity, (:) colon=conservative substitution; (.) period=weakly conservative substitution; and (space)=divergent substitution.

| | | |
|---|---|---|
| | 50 | |
| H1NC | MKAKLLVLLCTFTATYADTICIGYHANNSTDTVDTVLEKNVTVTHSVNLL | |
| H1PR8 | MKANLLVLLSALAAADADTICIGYHANNSTDTVDTVLEKTVTVTHSVNLL | |
| | ***:*****.:::*: ********************************** | |
| | 100 | |
| H1NC | EDSHNGKLCLLKGIAPLQLGNCSVAGWILGNPECELLISKESWSYIVETP | |
| H1PR8 | EDSHNGKLCRLKGIAPLQLGKCNIAGWLLGNPECDPLLPVRSWSYIVETP | |
| | ********* **********:*.:***:******: *:. .********* | |
| | 150 | |
| H1NC | NPENGTCYPGYFADYEELREQLSSVSSFERFEIFPKESSWPNHTVTGVSA | |
| H1PR8 | NSENGICYPGDFIDYEELREQLSSVSSFERFEIFPKESSWPNHNTNGVTA | |
| | *.*** **** * ******************************...**:* | |
| | 200 | |
| H1NC | SCSHNGKSSFYRNLLWLTGKNGLYPNLSKSYVNNKEKEVLVLWGVHHPPN | |
| H1PR8 | ACSHEGKSSFYRNLLWLTEKEGSYPKL2QSYVNKKGKEVLVLWGIHHPPN | |
| | :***:************* *:* **:*.:****:* ********:***** | |
| | 250 | |
| H1NC | IGNQRALYHTENAYVSVVSSHYSRRFTPEIAKRPKVRDQEGRINYYWTLL | |
| H1PR8 | SKEQQNIYQNENAYVSVVTSNYNRRFTPEIAERPKVRDQAGRMNYYWTLL | |
| | :*: :*:.********:*:*.********:******* **:******* | |
| | 300 | |
| H1NC | EPGDTIIFEANGNLIAPWYAFALSRGFGSGIITSNAPMDECDAKCQTPQG | |
| H1PR8 | KPGDTIIFEANGNLIAPMYAFALSRGFGSGIITSNASMHECNTKCQTPLG | |
| | :**************** ******************.*.**::***** * | |
| | 350 | |
| H1NC | AINSSLPFQNVHPVTIGECPKYVRSAKLRMVTGLRNIPSIQSRGLFGAIA | |
| H1PR8 | AINSSLPYQNIHPVTIGECPKYVRSAKLRMVTGLRNTPSIQSRGLFGAIA | |
| | *******:**:************************* ************* | |
| | 400 | |
| H1NC | GFIEGGWTGMVDGWYGYHHQNEQGSGYAADQKSTQNAINGITNKVNSVIE | |
| H1PR8 | GFIEGGWTGMIDGWYGYHHQNEQGSGYAADQKSTQNAINGITNKVNTVIE | |
| | ********:***********************************:*** | |
| | 450 | |
| H1NC | KMNTQFTAVGKEFNKLERRMENLNKKVDDGFLDIWTYNAELLVLLENERT | |
| H1PR8 | KMNIQFTAVGKEFNKLEKRMENLNKKVDDGFLDIWTYNAELLVLLENERT | |
| | *** *************:******************************** | |
| | 500 | |
| H1NC | LDFHDSNVKNLYEKVKSQLKNNAKEIGNGC-------------------- | |
| H1PR8 | LDFHDSNVKNLYEKVKSQLKNNAKEIGNGCFEFYHKCDNECMESVRNGTY | |
| | ****************************** | |
| | 550 | |
| H1NC | -------------------------------------------------- | |
| H1PR8 | DYPKYSEESKLNREKVDGVKLESMGIYQILAIYSTVASSLVLLVSLGAIS | |
| | | 565 |
| H1NC | --------------- (SEQ ID NO: 4) | |
| H1PR8 | FWMCSNGSLQCRICI (SEQ ID NO: 1) | |

[0368] Design of the HA1-1, 1-2 and 1-3 globular head constructs for A/Wisconsin/67/2005 (H3N2). The crystal structure for the Wisconsin HA has not been solved. To design the globular head constructs for this HA, the primary sequence of the Wisconsin HA (H3W is; SEQ ID NO: 6) was first aligned with a closely related reference HA molecule of the same subtype (primary sequence identity: 81.16%) for which the structure had been resolved, specifically influenza A/X31 subtype H3N2 (H3X31; SEQ ID NO: 7) (PDB accession number: 1VIU). The Wisconsin HA sequence was aligned with the X31 HA using CLUSTAL W and is shown below, where (*) asterisk=identity, (:) colon=conservative substitution; (.) period=weakly conservative substitution; and (space)=divergent substitution. Each amino acid in X31 was found to have a corresponding match in A/Wisconsin/67/2005 sequence. The domain boundaries the X31 structure were then used to identify the domain boundaries in the A/Wisconsin/67/2005.

| | |
|---|---|
| | 50 |
| H3Wis | QKLPGNDNSTATLCLGHHAVPNGTIVKTITNDQIEVTNATELVQSSSTGG |
| H3X31 | QDLPGNDNSTATLCLGNHAVPNGTLVKTITDDQIEVTNATELVQSSSTGK |
| | *.**********************:*****:****************** |
| | 100 |
| H3Wis | ICDSPHQILDGENCTLIDALLGDPQCDGFQNKKWDLFVERSKAYSNCYPY |
| H3X31 | ICNNPHRILDGIDCTLIDALLGDPHCDVFQNETWDLFVERSKAFSNCYPY |
| | **:.**:**** :***********:** ***:.**********:****** |
| | 150 |
| H3Wis | DVPDYASLRSLVASSGTLEFNDESFNWTGVTQNGTSSACKRRSNNSFFSR |
| H3X31 | DVPDYASLRSLVASSGTLEFITEGFTWTGVIQNGGSNACKPGPGSGFFSR |
| | ******************** *.***** *** *.**** ....**** |
| | 200 |
| H3Wis | LNWLTHLKFKYPALNVTMPNNEKFDKLYIWGVHHPGTDNDQIFLHAQASG |
| H3X31 | LNWLTKSGSTYPVLNVTMPNNDNFDKLYIWGIHHPSTNQEQTSLYVQASG |
| | *****: .**.********::********:***.*:::* *:.**** |
| 250 | |
| H3Wis | RITVSTKRSQQTVIPNIGSRPRIRNIPSRISIYWTIVKPGDILLINSTGN |
| H3X31 | RVTVSTRRSQQTIIPNIGSRPWVRGLSSRISIYWTIVKPGDVLVINSNGN |
| | *:****:*****:******** :*.:.**************:*:***.** |
| 300 | |
| H3Wis | LIAPRGYFKIRSGKSSIMRSDAPIGKCNSECITPNGSIPNDKPFQNVNRI |
| H3X31 | LIAPRGYFKMRTGKSSIMRSDAPIDTCISECITPNGSIPNDKPFQNVNKI |
| | *********:*:************..* ********************:* |
| 329 | |
| H3Wis | TYGACPRYVKQNTLKLATGMRNVPEKQTR (SEQ ID NO: 6) |
| H3X31 | TYGACPKYVKQNTLKLATGMRNVPEKQT- (SEQ ID NO: 7) |
| | **************************** |

### Results

[0369] Depiction of domain boundaries for PR8 HA constructs. The selected boundary domains are highlighted in the sequence below (SEQ ID NO: 1) as follows: HA1-1 boundaries are single-underlined (S53-R324 of SEQ ID NO: 1); HA1-2 boundaries are double-underlined (K62-S284 of SEQ ID NO: 1); HA1-3 boundaries are bold-underlined (N101-G276 of SEQ ID NO: 1). Detailed descriptions of each subunit design and boundary domains are given below.

(SEQ ID NO:1)
MKANLLVLLSALAAADADTICIGYHANNSTDTVDTVLEKNVTVTHSVNLLEDSHNGKLCR 60
LKGIAPLQLGKCNIAGWLLGNPECDPLLPVRSWSYIVETPNSENGICYPGDFIDYEELRE 120
QLSSVSSFERFEIFPKESSWPNHNTNGVTAACSHEGKSSFYRNLLWLTEKEGSYPKLKNS 180
YVNKKGKEVLVLWGIHHPPNSKEQQNLYQNENAYVSVVTSNYNRRFTPEIAERPKVRDQA 240
GRMNYYWTLLKPGDTIIFEANGNLIAPMYAFALSRGFGSGIITSNASMHECNTKCQTPLG 300
AINSSLPYQNIHPVTIGECPKYVRSAKLRMVTGLRNIPSIQSRGLFGAIAGFIEGGWTGM 360
IDGWYGYHHQNEQGSGYAADQKSTQNAINGITNKVNTVIEKMNIQFTAVGKEFNKLEKRM 420
ENLNKKVDDGFLDIWTYNAELLVLLENERTLDFHDSNVKNLYEKVKSQLKNNAKEIGNGC 480
FEFYHKCDNECMESVRNGTYDYPKYSEESKLNREKVDGVKLESMGIYQILAIYSTVASSL 540
VLLVSLGAISFWMCSNGSLQCRICI 565

[0370] PR/8 HA1-1 construct (SEQ ID NO: 8). For this construct, four (4) conserved disulfide bonds were preserved by making the amino-terminal truncation before the Cysteine at position 59 of SEQ ID NO: 1 and the carboxyl-terminal truncation after the Cysteine at position 319 of SEQ ID NO: 1. The preserved disulfide bonds are listed as the following: C59-C291; C72-C84; C107-C152 and C295-C319 of SEQ ID NO: 1. Using the crystal structure cited above and the Molecular Modeling Database (MMDB) to identify tertiary and secondary structure, the amino terminal truncation was placed at the Serine at position 53 of SEQ ID NO: 1, which is immediately adjacent to the coil turn formed by residues 50-52 of SEQ ID NO: 1 (LED). The truncation completely eliminated the preceding β-strand formed by residues 44-49 of SEQ ID NO: 1 [THSVNL (SEQ ID NO: 214)]. The strand spanning residues 53-58 of SEQ ID NO: 1 [SHNGKL (SEQ ID NO: 215)] and the entire β-strand associated with residues 59-62 of SEQ ID NO: 1 [CRLK (SEQ ID NO: 216)] were preserved. Although in the structure residues 53-58 of SEQ ID NO: 1 [SHNGKL (SEQ ID NO: 215)] are defined as a random coil, these residues mimic a β-strand and thus serve to further stabilize the β-pleated sheets defined by residues 307-310 of SEQ ID NO: 1 [PYQN, SEQ ID NO: 217] and residues 320-323 of SEQ ID NO: 1 [PKYV, SEQ ID NO: 218]. The carboxyl-terminal truncation was made in the random coil sequence spanning residues 324-327 of SEQ ID NO: 1 [RSAK, SEQ ID NO: 219] at the Arginine at position 324 of SEQ ID NO: 1 such that the carboxyl-terminal tail which interacts with HA2 was completely eliminated.

[0371] PR/8 HA1-2 construct (SEQ ID NO: 9). For this construct two (2) conserved disulfide bonds (C72-C84 and C107-C152 of SEQ ID NO: 1) were preserved by making the amino-terminal truncation before the Cysteine at position 72 of SEQ ID NO: 1 and the carboxyl-terminal truncation after the Cysteine at position 152 of SEQ ID NO: 1. Using the crystal structure cited above and the MMD database to identify tertiary and secondary structure, the amino-terminal and the carboxyl-terminal truncations were placed in the loops [KGI, residues 62-64 of SEQ ID NO: 1 and NASMHE (SEQ ID NO: 220), residues 285-290, of SEQ ID NO: 1] that connect two distinct sets of β-pleated sheets. Truncation of the molecule within these loops preserves the surrounding secondary structure which in turn preserves the tertiary structure of the globular head.

[0372] The amino-terminal truncation was made at the Lysine at position 62 of SEQ ID NO: 1, such that the β-strand comprising APLQLG (SEQ ID NO: 221) at residues 65-70 of SEQ ID NO: 1 of the membrane-distal set of β-strands remained wholly intact, while the preceding β-strand [CRLK, SEQ ID NO: 216, residues 59-62 of SEQ ID NO: 1] that is more membrane-proximal was largely eliminated. The carboxyl-terminal truncation was made at the Serine at position 284 of SEQ ID NO: 1 such that the β-strand [GIITS, SEQ ID NO: 222, residues 280-284 of SEQ ID NO: 1] of the distal set of β-strands remains wholly or largely intact and the subsequent β-strand [CNTK, SEQ ID NO: 223, residues 291-294 of SEQ ID NO: 1] of the proximal set of t-stands is wholly or largely eliminated. Preservation of the distal set of β-strands was the main determinant in selecting the domain boundaries for the HA1-2 construct. The distal β-pleated sheet, which is comprised of β-strands of APLQLG (SEQ ID NO: 221) [residues 65-70 of SEQ ID NO: 1], SYIVET (SEQ ID NO: 224) [residues 94-99 of SEQ ID NO: 1], and GIITS (SEQ ID NO: 222) [residues 280-284 of SEQ ID NO: 1], serves as the stabilizing secondary structural element that ensures a compact domain structure.

[0373] PR/8 HA1-3 construct (SEQ ID NO: 10). For this construct one (1) conserved disulfide bond (C107-C152 of SEQ ID NO: 1) was preserved by making the amino-terminal truncation before the Cysteine at position 107 of SEQ ID NO: 1 and the carboxyl terminal truncation after the Cysteine at position 152 of SEQ ID NO: 1. Using the crystal structure cited above and the MMDB database to identify tertiary and secondary structure the amino-terminal truncation was made at the Asparagine at position 101 of SEQ ID NO: 1 such that the preceding α-helix [NIAGWLLG, SEQ ID NO: 225, residues 73-80 of SEQ ID NO: 1] and β-strand [SYIVET, SEQ ID NO: 224, residues 94-99 of SEQ ID NO: 1] were completely eliminated while the subsequent β-stand [PGDFI, SEQ ID NO: 226, residues 109-113 of SEQ ID NO: 1] was preserved along with the strand NSENGICY, SEQ ID NO: 227 [residues 101-108 of SEQ ID NO: 1] that includes the conserved Cysteine at position 107 of SEQ ID NO: 1.

[0374] The carboxyl-terminal truncation was made near the end of the β-strand [AFALSRGF, SEQ ID NO: 228, residues 270-277 of SEQ ID NO: 1]. The last amino acid of this strand, position 277 of SEQ ID NO: 1, is a Phenylalanine, which was eliminated so as not to expose this hydrophobic residue. The carboxyl-terminal truncation was made at the Glycine at position 276 of SEQ ID NO: 1 which is in between two secondary structures. Truncation at this position keeps the preceding β-strand [AFALSRG, SEQ ID NO: 229, residues 270-276 of SEQ ID NO: 1] largely intact and completely eliminates the subsequent β-strand [GIITS, SEQ ID NO: 222, residues 280-284 of SEQ ID NO: 1].

[0375] Depiction of domain boundaries for VN04 HA construct. The selected boundary domains are highlighted in the sequence below (SEQ ID NO: 2) as follows: HA1-1 boundaries are single-underlined (E50-K323 of SEQ ID NO: 2); HA1-2 boundaries are double-underlined (G62-E284 of SEQ ID NO: 2); HA1-3 boundaries are bold-underlined (N103-G276 of SEQ ID NO: 2). Detailed descriptions of each subunit design and boundary domains are given below.

(SEQ ID NO:2)
MEKIVLLFAIVSLVKSDQICIGYHANNSTEQVDTIMEKNVTVTHAQDILEKKHNGKLCDL 60
DGVKPLILRDCSVAGWLLGNPMCDEFINVPEWSYIVEKANPVNDLCYPGDFNDYEELKHL 120
LSRINHFEKIQIIPKSSWSSHEASLGVSSACPYQGKSSFFRNVVWLIKKNSTYPTIKRSY 180
NNTNQEDLLVLWGIHHPNDAAEQTKLYQNPTTYISVGTSTLNQRLVPRIATRSKVNGQSG 240
RMEFFWTILKPNDAINFESNGNFIAPEYAYKIVKKGDSTIMKSELEYGNCNTKCQTPMGA 300
INSSMPFHNIHPLTIGECPKYVKSNRLVLATGLRNSPQRERRRKKRGLFGAIAGFIEGGW 360
QGMVDGWYGYHHSNEQGSGYAADKESTQKAIDGVTNKVNSIIDKMNTQFEAVGREFNNLE 420
RRIENLNKKMEDGFLDVWTYNAELLVLMENERTLDFHDSNVKNLYDKVRLQLRDNAKELG 480
NGCFEFYHKCDNECMESVRNGTYDYPQYSEEARLKREEISGVYTESIGIYQILSIYSTVA 540
SSLALAIMVAGLSLWMCSNGSLQCR 565

[0376] VN04 HA1-1 construct (SEQ ID NO: 11). For this construct four (4) conserved disulfide bonds were preserved by making the amino terminal truncation before the Cysteine at position 58 of SEQ ID NO: 2 and the carboxyl-terminal truncation after the Cysteine at position 318 of SEQ ID NO: 2. The preserved disulfide bonds are listed as the following: C58-C290; C71-C83; C106-C151 and C294-C318 of SEQ ID NO: 2. Using the crystal structure cited above and the Molecular Modeling Database (MMDB) to identify tertiary and secondary structure, the amino terminal truncation was placed at the Glutamic Acid found at position 50 of SEQ ID NO: 2 such that the preceding β-strand [THAQDI, SEQ ID NO: 230, residues 43-48 of SEQ ID NO: 2] is totally eliminated and the subsequent strand [EKKHNG, SEQ ID NO: 231, residues 50-55 of SEQ ID NO: 2] and the β-strand [KLCDLD, SEQ ID NO: 232] formed by residues 56-61 of SEQ ID NO: 2 were left wholly intact. Structurally the random peptide comprising residues 50-55 of SEQ ID NO: 2 [EKKHNG, SEQ ID NO: 231] mimics a β-strand that completes the membrane-distal β-pleated sheet to keep the domain structure intact. The carboxyl-terminal truncation was made in the loop region near residues 323-326 of SEQ ID NO: 2 [KSNR, SEQ ID NO: 233] that follow the Cysteine at position 318 of SEQ ID NO: 2. Truncation within this loop preserves secondary structure in that the preceding β-strand formed by residues 319-322 of SEQ ID NO: 2 [PKYV, SEQ ID NO: 234] remains wholly intact and the subsequent β-strand [LVLATG, SEQ ID NO: 235, residues 327-332 of SEQ ID NO: 2] is completely eliminated.

[0377] VN04 HA1-2 construct (SEQ ID NO: 12). For this construct two (2) conserved disulfide bonds (C71-C83 and C106-C151 of SEQ ID NO: 2) were preserved by making the amino-terminal truncation before the Cysteine at position 71 of SEQ ID NO: 2 and the carboxyl-terminal truncation after the Cysteine at position 151 of SEQ ID NO: 2. Using the crystal structure cited above and the Molecular Modeling Database (MMDB) to identify tertiary and secondary structure, the amino terminal truncation was placed at the glycine at position 62 of SEQ ID NO: 2 such that the subsequent β-strand comprising residues 64-68 of SEQ ID NO: 2 [KPLIL, SEQ ID NO: 236] remains wholly intact, while the preceding β-strand [KLCDLD, SEQ ID NO: 232, residues 56-61 of SEQ ID NO: 2] is completely eliminated.

[0378] To preserve secondary structure, the carboxyl-terminal truncation was made in the loop region at the Glutamic Acid at position 284 of SEQ ID NO: 2 such that the preceding β-strand [TIMKS, SEQ ID NO: 237, residues 279-283 of SEQ ID NO: 2] remained wholly or largely intact and the subsequent β-strand [YGNCN, SEQ ID NO: 238, residues 287-291 of SEQ ID NO: 2] was completely eliminated.

[0379] VN04 HA1-3 construct (SEQ ID NO: 13). For this construct one (1) conserved disulfide bond (C106-C151 of SEQ ID NO: 2) was preserved by making the amino-terminal truncation before the Cysteine at position 106 of SEQ ID NO: 2 and the carboxyl terminal truncation after the Cysteine at position 151 of SEQ ID NO: 2.

[0380] Using the crystal structure cited above and the Molecular Modeling Database (MMDB) to identify tertiary and secondary structure, the amino terminal truncation was placed at the Asparagine at position 103 of SEQ ID NO: 2 such that the preceding β-strand [SYIVEK, SEQ ID NO: 239, residues 93-98 of SEQ ID NO: 2] was completely eliminated while the subsequent β-strand sequence [PGDFN, SEQ ID NO: 240, residues 108-112 of SEQ ID NO: 2] remained wholly or largely intact. To preserve secondary structure, the carboxyl-terminal truncation was made in the random coil region at the Glycine at position 276 of SEQ ID NO: 2 such that the preceding β-strand formed by residues 102-105 of SEQ ID NO: 2 [KGDS, SEQ ID NO: 241] remains wholly or partially intact, the preceding β-strand [EYAYKIVK, SEQ ID NO: 242, residues 267-274 of SEQ ID NO: 2] is wholly preserved and the subsequent β-strand [TIMKS, SEQ ID NO: 237, residues 279-283 of SEQ ID NO: 2] is completely eliminated.

[0381] Depiction of domain boundaries for IND05 HA constructs. The A/Indonesia/5/2005 construct description is based on sequence alignment in reference to A/Viet Nam/1203/2004 structure. The selected boundary domains are highlighted in the sequence below (SEQ ID NO: 3) as follows: HA1-1 boundaries are single-underlined (E50-K323, of SEQ ID NO: 3); HA1-2 boundaries are double-underlined (G62-E284 of SEQ ID NO: 3); HA1-3 boundaries are bold-underlined (N103-G276 of SEQ ID NO: 3). Detailed descriptions of each subunit design and boundary domains are given below.

(SEQ ID NO:3)
MEKIVLLLAIVSLVKSDQICIGYHANNSTEQVDTIMEKNVTVTHAQDILEKTHNGKLCDL 60
DGVKPLILRDCSVAGWLLGNPMCDEFINVPEWSYIVEKANPTNDLCYPGSFNDYEELKHL 120
LSRINHFEKIQIIPKSSWSDHEASSGVSSACPYLGSPSFFRNVVWLIKKNSTYPTIKKSY 180
NNTNQEDLLVLWGIHHPNDAAEQTRLYQNPTTYISIGTSTLNQRLVPKIATRSKVNGQSG 240
RMEFFWTILKPNDAINFESNGNFIAPEYAYKIVKKGDSAIMKSELEYGNCNTKCQTPMGA 300
INSSMPFHNIHPLTIGECPKYVKSNRLVLATGLRNSPQRESRRKKRGLFGAIAGFIEGGW 360
QGMVDGWYGYHHSNEQGSGYAADKESTQKAIDGVTNKVNSIIDKMNTQFEAVGREFNNLE 420
RRIENLNKKMEDGFLDVWTYNAELLVLMENERTLDFHDSNVKNLYDKVRLQLRDNAKELG 480
NGCFEFYHKCDNECMESIRNGTYNYPQYSEEARLKREEISGVKLESIGTYQILSIYSTVA 540
SSLALAIMMAGLSLWMCSNGSLQCRICI 560

[0382] IND05 HA1-1 construct (SEQ ID NO: 14). For this construct four (4) conserved disulfide bonds were preserved by making the amino-terminal truncation before the Cysteine at position 58 of SEQ ID NO: 3 and the carboxyl-terminal truncation after the Cysteine at position 318 of SEQ ID NO: 3. The preserved disulfide bonds are listed as the following: C58-C291; C71-C83; C106-C151 and C294-C318 of SEQ ID NO: 3. Using the crystal structure cited above and the Molecular Modeling Database (MMDB) to identify tertiary and secondary structure, the amino terminal truncation was placed at the Glutamic Acid found at position 50 of SEQ ID NO: 3 such that the preceding β-strand [THAQDI, SEQ ID NO: 243, residues 43-48 of SEQ ID NO: 3] was totally eliminated and the subsequent strand [EKTHNG, SEQ ID NO: 244, residues 50-55 of SEQ ID NO: 3] and β-strand [KLCDLD, SEQ ID NO: 245] formed by residues 56-61 of SEQ ID NO: 3 was left wholly intact. Structurally the random peptide comprising residues 50-55 of SEQ ID NO: 3 [EKTHNG, SEQ ID NO: 244] mimics a β-strand that completes the membrane-distal β-pleated sheet to keep the domain structure intact. The carboxyl-terminal truncation was made in the loop region near residues 323-326 of SEQ ID NO: 3 [KSNR, SEQ ID NO: 246] that follow the Cysteine at position 318 of SEQ ID NO: 3. Truncation within this loop preserves secondary structure in that the preceding β-strand formed by residues 319-322 of SEQ ID NO: 3 [PKYV, SEQ ID NO: 247] remains wholly intact and the subsequent β-strand [LVLATG, SEQ ID NO: 248, residues 327-332 of SEQ ID NO: 3] is completely eliminated.

[0383] IND05 HA1-2 construct (SEQ ID NO: 15). For this construct two (2) conserved disulfide bonds (C71-C83 and C106-C151 of SEQ ID NO: 3 were preserved by making the amino-terminal truncation before the Cysteine at position 71 of SEQ ID NO: 3 and the carboxyl-terminal truncation after the Cysteine at position 151 of SEQ ID NO: 3. Using the crystal structure cited above and the Molecular Modeling Database (MMDB) to identify tertiary and secondary structure, the amino terminal truncation was placed at the Glycine at position 62 of SEQ ID NO: 3 such that the subsequent α-strand comprising residues 64-68 of SEQ ID NO: 3 [KPLIL, SEQ ID NO: 249] remained wholly intact, while the preceding β-strand [KLCDLD, SEQ ID NO: 245, residues 56-61 of SEQ ID NO: 3] was completely eliminated. To preserve secondary structure, the carboxyl terminal truncation was made in the loop region at the Glutamic Acid at position 284 of SEQ ID NO: 3 in the sequence [ELE, residues 284-286 of SEQ ID NO: 3] such that the preceding β-strand [AIMKS, SEQ ID NO: 250, residues 279-283 of SEQ ID NO: 3] remained wholly or largely intact and the subsequent α-strand [YGNCN, SEQ ID NO: 251, residues 287-291 of SEQ ID NO: 3] was completely eliminated.

[0384] IND05 HA1-3 construct (SEQ ID NO: 16). For this construct one (1) conserved disulfide bond (C106-C151 of SEQ ID NO: 3 was preserved by making the amino-terminal truncation before the Cysteine at position 106 of SEQ ID NO: 3 and the carboxyl-terminal truncation after the Cysteine at position 151 of SEQ ID NO: 3. Using the crystal structure cited above and the Molecular Modeling Database (MMDB) to identify tertiary and secondary structure, the amino terminal truncation was placed at the asparagine at position 103 of SEQ ID NO: 3 such that the preceding α-strand [SYIVEK, SEQ ID NO: 252, residues 93-98 of SEQ ID NO: 3] was completely eliminated while the β-strand sequence [PGSFN, SEQ ID NO: 253, residues 108-112 of SEQ ID NO: 3] remained wholly or largely intact. To preserve secondary structure, the carboxyl-terminal truncation was made in the random coil region at the Glycine found at position 276 of SEQ ID NO: 3 such that the preceding β-strand [EYAYKIVK, SEQ ID NO: 254, residues 267-274 of SEQ ID NO: 3] was wholly preserved and the subsequent β-strand [AIMKS, SEQ ID NO: 250, residues 279-283 of SEQ ID NO: 3] was completely eliminated.

[0385] Depiction of domain boundaries for New Calcdonia HA constructs. A/New Calcdonia/20/199 construct description is based on sequence alignment in reference of A/Puerto Rico/8/34 structure. The selected boundary domains are highlighted in the sequence below (SEQ ID NO: 4) as follows: HA1-1 boundaries are single-underlined (S53-R324 of SEQ ID NO: 4); HA1-2 boundaries are double-underlined (K62-S284 of SEQ ID NO: 4); HA1-3 boundaries are bold-underlined (N101-G276 of SEQ ID NO: 4). Detailed descriptions of each subunit design and boundary domains are given below.

(SEQ ID NO:4)
MKAKLLVLLCTFTATYADTICIGYHANNSTDTVDTVLEKNVTVTHSVNLLEDSHNGKLCL 60
LKGIAPLQLGNCSVAGWILGNPECELLISKESWSYIVETPNPENGTCYPGYFADYEELRE 120
QLSSVSSFERFEIFPKESSWPNHTVTGVSASCSHNGKSSFYRNLLWLTGKNGLYPNLSKS 180
YVNNKEKEVLVLWGVHHPPNIGNQRALYHTENAYVSVVSSHYSRRFTPEIAKRPKVRDQE 240
GRINYYWTLLEPGDTIIFEANGNLIAPWYAFALSRGFGSGIITSNAPMDECDAKCQTPQG 300
AINSSLPFQNVHPVTIGECPKYVRSAKLRMVTGLRNIPSIQSRGLFGAIAGFIEGGWTGM 360
VDGWYGYHHQNEQGSGYAADQKSTQNAINGITNKVNSVIEKMNTQFTAVGKEFNYTERRN 420
ENLNKKVDDGFLDIWTYNAELLVLLENERTLDFHDSNVKNLYEKVKSQLKNNAKEIGNGC 480
FEFYHKCNNECMESVKNGTYDYPKYSEESKLNREKIDGVKLESMGVYQILAIYSTVASSL 540
VLLVSLGAISFWMCSNGSLQCRICI 565

[0386] New Calcdonia HA1-1 construct design (SEQ ID NO: 17). For this construct, four (4) conserved disulfide bonds were preserved by making the amino terminal truncation before the Cysteine at position 59 of SEQ ID NO: 4 and the carboxyl-terminal truncation after the Cysteine at position 319 of SEQ ID NO: 4. The preserved disulfide bonds are listed as the following: C59-C291; C72-C84; C107-C152 and C295-C319 of SEQ ID NO: 4. Using the reference crystal structures and the MMDB to check secondary structures the amino terminal truncation was made at the Serine at position 53 of SEQ ID NO: 4 such that the preceding β-strand [THSVNLLED, SEQ ID NO: 255, residues 44-52 of SEQ ID NO: 4] was totally eliminated and the subsequent β-strands SHNGKL, SEQ ID NO: 256 [residues 53-58 of SEQ ID NO: 4] and APLQLG, SEQ ID NO: 257 [residues 65-70, of SEQ ID NO: 4] were left wholly intact. The amino-terminal truncation in the random coil sequence [SHNGKL, SEQ ID NO: 256, residues 53-58 of SEQ ID NO: 4] left the secondary structure largely intact because it mimics a β-strand that leaves the β-pleated sheet intact. The carboxyl-terminal truncation was made at the Arginine at position 324 of SEQ ID NO: 4 in the random coil sequence [RSAK, SEQ ID NO: 258, residues 324-327 of SEQ ID NO: 4] following the Cysteine at position 319 of SEQ ID NO: 4. The truncation in this random coil preserves secondary structure by leaving the preceding β-strand [PKYV, SEQ ID NO: 259, residues 320-323 of SEQ ID NO: 4] wholly intact while the subsequent β-strand [LRMVTG, SEQ ID NO: 260, residues 328-333 of SEQ ID NO: 4] is completely eliminated.

[0387] New Calcdonia HA1-2 construct design (SEQ ID NO: 18). For this construct two (2) conserved disulfide bonds (C72-C84 and C107-C152 of SEQ ID NO: 4) were preserved by making the amino-terminal truncation before the Cysteine at position 72 of SEQ ID NO: 4 and the carboxyl-terminal truncation after the Cysteine at position 152 of SEQ ID NO: 4. Using the reference crystal structures and the MMDB to check secondary structures the amino-terminal truncation was made at the Lysine at position 62 of SEQ ID NO: 4 such that the random coil sequence comprising [SHNGKLCLLKGI, SEQ ID NO: 261, residues 53-64 of SEQ ID NO: 4] was partially or largely removed, the preceding β-strand [THSVNLLED, SEQ ID NO: 255, residues 44-52 of SEQ ID NO: 4] was completely eliminated and the subsequent β-strand [APLQLG, SEQ ID NO: 257, residues 65-70 of SEQ ID NO: 4] remained wholly intact. The carboxyl-terminal truncation was made at the Serine at position 284 of SEQ ID NO: 4 such that the preceding β-strand [SGIITS, SEQ ID NO: 262, residues 279-284 of SEQ ID NO: 4] remained wholly intact and the subsequent random coil [NAPMDECDA, SEQ ID NO: 263, residues 285-293 of SEQ ID NO: 4] was wholly or largely eliminated.

[0388] New Calcdonia HA1-3 construct design (SEQ ID NO: 19). For this construct one (1) conserved disulfide bond (C107-C152 of SEQ ID NO: 4 was preserved by making the amino-terminal truncation before the Cysteine at position 107 of SEQ ID NO: 4 and the carboxyl terminal truncation after C152 of SEQ ID NO: 4. Using the reference crystal structures and the MMDB to check secondary structures the amino-terminal truncation was made at the Asparagine at position 101 of SEQ ID NO: 4 such that the receding β-strand [SYIVET, SEQ ID NO: 264, residues 94-99 of SEQ ID NO: 4] was completely eliminated and the subsequent β-strand [PGYFA, SEQ ID NO: 265, residues 109-113 of SEQ ID NO: 4] remained wholly intact. To preserve the secondary structure the carboxyl-terminal truncation was made at the Glycine at position 276 of SEQ ID NO: 4 such that the β-strand sequence [YAFALSRGF, SEQ ID NO: 266, residues 269-277 of SEQ ID NO: 4] remained largely intact, while the subsequent β-strand sequence [SGIITS, SEQ ID NO: 262, residues 279-284 of SEQ ID NO: 4] was eliminated.

[0389] Depiction of domain boundaries for A/Wisconsin/67/2005 HA constructs. A/Wisconsin/67/2005 construct description is based on sequence alignment in reference of A/X31 structure. The selected boundary domains are highlighted in the sequence below (SEQ ID NO: 6) as follows: HA1-1 boundaries are single-underlined (Q44-K310 of SEQ ID NO: 6); HA1-2 boundaries are double-underlined (S54-D271 of SEQ ID NO: 6); HA1-3 boundaries are bold-underlined (S95-G263 of SEQ ID NO: 6); Detailed descriptions of each subunit design and boundary domains are given below.

(SEQ ID NO:6)
QKLPGNDNSTATLCLGHHAVPNGTIVKTITNDQIEVTNATELVQSSSTGGICDSPHQILD 60
GENCTLIDALLGDPQCDGFQNKKWDLFVERSKAYSNCYPYDVPDYASLRSLVASSGTLEF 120
NDESFNWTGVTQNGTSSACKRRSNNSFFSRLNWLTHLKFKYPALNVTMPNNEKFDKLYIW 180
GVHHPGTDNDQIFLHAQASGRITVSTKRSQQTVIPNIGSRPRIRNIPSRISIYWTIVKPG 240
DILLINSTGNLIAPRGYFKIRSGKSSIMRSDAPIGKCNSECITPNGSIPNDKPFQNVNRI 300
TYGACPRYVKQNTLKLATGMRNVPEKQTR 329

[0390] A/Wisconsin/67/2005 HA1-1 construct design (SEQ ID NO: 20). For this construct, four (4) conserved disulfide bonds were preserved by making the amino terminal truncation before the Cysteine at position 52 of SEQ ID NO: 6 and the carboxyl-terminal truncation after the Cysteine at position 305 of SEQ ID NO: 6. The preserved disulfide bonds are listed as the following: C52-C277; C64-C76; C97-C139 and C281-C305 of SEQ ID NO: 6. Using the reference crystal structures and the MMDB to check secondary structures the amino terminal truncation was made at the Glutamine at position 44 of SEQ ID NO: 6, right after the tight turn formed by residues 42 and 43 of SEQ ID NO: 6 [LV], such that the preceding β-strand [TNATE, SEQ ID NO: 267, residues 37-41 of SEQ ID NO: 6] was totally eliminated while the entire short β-strand formed by residues QSS [44-46 of SEQ ID NO: 6] was preserved. The carboxyl-terminal truncation was made in the random coil sequence [PRYVK, SEQ ID NO: 268, residues 306-310 of SEQ ID NO: 6] following the Cysteine at position 305 of SEQ ID NO: 6 such that the carboxyl-terminal tail which interacts with HA2 was completely eliminated. Although the carboxyl-terminal sequence [PRYVK, SEQ ID NO:268, residues 306-310 of SEQ ID NO: 6)] is defined as a random coil, structurally it serves as an additional β-strand that further stabilizes the β-pleated sheets defined by residues 44-46 of SEQ ID NO: 6 [QSS] and residues 293-297 of SEQ ID NO: 6 [PFQNV, SEQ ID NO: 269]. This set of β-pleated encompasses the amino-terminus and carboxy-terminus within one stable secondary structure element to ensure a compact domain structure.

[0391] A/Wisconsin/67/2005 HA1-2 construct design (SEQ ID NO: 21). For this construct two (2) conserved disulfide bonds (C64-C76 and C97-C139 of SEQ ID NO: 6) were preserved by making the amino-terminal truncation before the Cysteine at position 64 of SEQ ID NO: 6 and the carboxyl-terminal truncation after the Cysteine at position 139 of SEQ ID NO: 6. Using the reference crystal structures and the MMDB to check secondary structures the amino-terminal truncation was made in the loops that connect two distinct sets of β-pleated sheets. The amino-terminal truncation was made at the Serine at position 54 of SEQ ID NO: 6, such that the β-strand comprising residues 57-62 of SEQ ID NO: 6 [QILDGE, SEQ ID NO: 270] of the membrane-distal set of β-strands remained wholly intact, while the membrane-proximal β-strand [GGICD, SEQ ID NO: 271, residues 49-53 of SEQ ID NO: 6] was completely eliminated. The carboxyl-terminal truncation was made at the Aspartic Acid at position 271 of SEQ ID NO: 6. Truncation at this position preserved secondary structure such that the membrane-distal β-strand [SSIMRS, SEQ ID NO: 272, residues 265-270 of SEQ ID NO: 6] remained intact while the membrane-proximal β-strand [APIGK, SEQ ID NO: 273, residues 272-276 of SEQ ID NO: 6] was eliminated. The membrane-distal β-pleated sheets comprising β-strands QILDGE (SEQ ID NO: 270), [residues 57-62 of SEQ ID NO: 6] LFVER (SEQ ID NO: 274) [residues 86-90 of SEQ ID NO: 6], and SSIMRS, (SEQ ID. NO: 272), [residues 265-270 of SEQ ID NO: 6] serve as the stabilizing secondary structure element that ensures a compact domain structure.

[0392] A/Wisconsin/67/2005 HA1-3 construct design (SEQ ID NO: 22). For this construct one (1) conserved disulfide bond (C97-C139 of SEQ ID NO: 6) was preserved by making the amino-terminal truncation before the Cysteine at position 97 of SEQ ID NO: 6 and the carboxy-terminal truncation after the Cysteine at position 139 of SEQ ID NO: 6. Using the reference crystal structure and the MMDB to check secondary structures the amino-terminal truncation was made at the Serine at position 95 of SEQ ID NO: 6 such that the preceding α-helix [TLIDALLG, SEQ ID NO: 275, residues 65-72 of SEQ ID NO: 6] was completely eliminated while the Serine at position 95 of SEQ ID NO: 6 and Asparagine at position 96 of SEQ ID NO: 6 were preserved along with the conserved Cysteine at position 97 of SEQ ID NO: 6. The carboxyl-terminal truncation was made in the random coil sequence at about the Glycine at position 263 of SEQ ID NO: 6 such that the random coil sequence containing residues 261-263 of SEQ ID NO: 6 [RSG] was kept wholly or partially intact, while the preceding β-strand [RGYFKI, SEQ ID NO: 276, residues 255-260 of SEQ ID NO: 6] was wholly preserved and the subsequent β-strand [SSIMRS, SEQ ID NO: 272, residues 265-270 of SEQ ID NO: 6] was completely eliminated.

### Discussion

[0393] Parts of the globular head domain of the influenza virus hemagglutinin (HA) protein may generate neutralizing antibodies (Brand and Skehel; 1972; Eckert, 1973; Jackson et al., 1979; Russ et al., 1981) and the discrete, globular structure of this domain was thought to constitute a protein fragment which could be expressed in bacteria and refolded, or expressed and secreted from a eukaryotic host, thereby avoiding the expression and purification problems which have been encountered producing the full-length HA protein.

[0394] The largest HA construct (also referred to herein as “HA fragment”) fused to STF2, HA1-1 (SEQ ID NO: 8, 11, 14, 17, 20), encompasses most of or likely the entire globular region of the naturally occurring (wild type) HA1 head domain. A naturally occurring fragment of HA1 very similar to the HA1-1 construct is released from the virus on limited proteolysis (Bizeband et al., 1995). Thus, structural analysis and experimental data suggest that the HA1-1 construct should fold efficiently, whether produced in bacteria or eukaryotes, and maintain a stable native-like structure. Similarly, it is expected that the entire HA0s, the external portion of HA molecule outside the viral membrane (SEQ ID NO: 23) consisting of HA1 and HA2 but excluding the signal peptide (17 aa), internal peptide within the viral membrane (12 aa) and transmembrane domain (24 aa) should attain its native conformation when expressed in a eukaryotic host or can be refolded into a native state in vitro when expressed in bacteria. The two smaller HA fragments (HA1-2 (SEQ ID NO: 9, 12, 15, 18, 21) and HA1-3 (SEQ ID NO: 10, 13, 16, 19, 22)) truncate the region of the head domain distal to the receptor binding site in a manner which may either destabilize the resulting protein fragment (HA1-3) or expose the side chains of a few large hydrophobic residues (HA1-2). For this reason, experimental mutations were introduced into the HA1-2 and HA1-3 constructs, denoted as HA1-2mut (SEQ ID NO: 24, 26, 28, 30, 32) and HA1-3mut (SEQ ID NO: 25, 27, 29, 31, 33). The substitutions made in the HA1-3mut (SEQ ID NO: 25, 27, 29, 31, 33) construct introduce oppositely charged residues on the opposite strands which are left exposed by the HA1-3 truncations. “HA mut,” as used herein, means an amino acid in the native or naturally occurring HA has been substituted with an amino acid that does not occur in the native or naturally occurring HA. Substituted residues may form a salt bridge and stabilize a structure which may otherwise fold poorly, or not at all. For example, in PR8, G105 was replaced by glutamate and Y115 was substituted with lysine (SEQ ID NO: 25). Negatively charged glutamate interacted with positively charged lysine residue so that N-terminal peptide 1-8 of SEQ ID NO: 25 [NSENEICY, SEQ ID NO: 277] was stabilized by charge-charge interaction with Lysine 15 located at the N-terminus of the short helix 15-22 of SEQ ID NO: 25 [KEELREQL, SEQ ID NO: 278] in the center of the molecule. For the HA1-2 construct, the truncations can lead to the exposure of hydrophobic side chains which would not be expected to impair expression of the protein. However, the exposed residues may lead to aggregation of expressed protein or instability of expressed protein. To avoid aggregation and enhance the stability of the expressed molecule the few large hypdrophobic residues that become exposed were substituted with more neutral amino acids to generate HA1-2mut (SEQ ID NO: 24, 26, 28, 30, 32). These substitutions may result in a protein which is more amenable to a robust manufacturing process and/or long term stability.

### Example 2

### Design of Portions of a Naturally Occurring Hemagglutinin of Influenza B

### Materials and Methods

[0395] Design of the HA1-1, 1-2 and 1-3 globular head constructs for B/Lee/40. Structural considerations in the design of an influenza B HA vaccine are similar to those for influenza A, i.e., the domain boundary of the globular head of HA must be identified so that the flagellin-HA fusion protein can fold correctly or be refolded correctly to expose appropriate antigenic epitopes. Unlike influenza A, well-defined X-ray crystallographic structures are not available for influenza B HA, thus it is more difficult to unambiguously define the domain boundary of globular head. Therefore the influenza B HA model must be predicted based on bioinformatic and structural models (Tung et al. 2004. J. Gen. Virl. 85, 3249-3259). These investigators used a “knowledge-based” approach which depends on a high degree of sequence homology between the known structure from the protein data bank and the target unknown structure. In general, this approach benefits most from at least 35% sequence identity between the known and target proteins.

[0396] In the case of influenza B, the closest models come from A/Swine/Hong Kong/9/98 (SEQ ID NO: 34) (24% identity, PDB accession code 1JSD) and A/Aichi/2/68 (SEQ ID NO: 35) (21% identity, PDB accession code 1HGF). Although the sequence identities between the target model B/Lee/40 HA (SEQ ID NO: 36) and known template models are substantially below the desired minimum of 35%, the close similarity of the functions and tertiary folds of influenza A HA proteins in spite of their sequence divergence (H1, H3, H5 and H9 share only 18% sequence identity) suggest a possibly successful prediction of influenza B HA structure using the influenza A HA model. Moreover, influenza C HEF (Hemagglutinin-Esterase-Fusion) protein folds similarly to influenza A HA structure despite even lower sequence identity than any of the A/B comparison.

[0397] Since the crystal structure of influenza C HEF is known (PDB accession number 1FLC, MMDB accession number 12663), Tung et al included the knowledge of the structure similarity between C HEF and the known influenza A HA proteins to predict influenza B HA structure. Tung et al first aligned the HEF sequence from C/Johannesburg/1/66 (SEQ ID NO: 37) with one sequence from each of the 15 HA subtypes of influenza A virus (http://flu.lanl.gov) using CLUSTALW (Thompson et al. 1994. Nucleic Acids Res 22, 4673-4680) and compiled a profile based on structure-informed alignment.

[0398] The conserved secondary structural features were captured and assigned, as well as the variations among the types and subtypes by year and host species. They then further aligned the augmented A/C profile to an alignment of influenza B HA sequences, including B/Lee/40. The homology modeling techniques of Tung (1999) was used to construct B/Lee/40 model.

[0399] Briefly, they first matched the main-chain structures of the target to those of the template in the aligned regions. Insertions in the target relative to the template were treated as loops with known end-structure. Stretching the predicted structure accommodated insertions in the template relative to the target. The main chain structures of the loops were modeled by using an efficient Monte Carlo loop-sampling method (Tung, 1997; Ryu et al., 1998). Once the main-chain structure was modeled, the side-chain atoms were attached. As the head of the HA molecule is compact, limited space is available to place the side-chain atoms. Hence, in the analysis, side-chain torsional angles were initialized to equal or be close to those in the template structure. This consideration is particularly useful in avoiding clashes between side chains in the modeled structure. Finally, the all-atom models were subjected to a short run of energy minimization (1000 cycles) by using AMBER (Weiner et al., 1986) to relieve unfavourable steric interactions and to optimize the stereochemistry. The quality of the target model was checked by PROCHECK (Wilson et al. 1998. J. Mol Biol. 276, 417-436) and the functionality was checked by substrate docking to test whether the model substrate binding site can accommodate the natural receptor analogue sialyllactose as we have seen in the crystal structure of the HA of A/Aichi/2/68 (Weis et al. 1988. Nature 333, 426-431). The simulated B/Lee/40 model appears reasonable in a Ramachandran Plot (Wilson et al. 1998. J. Mol Biol. 276, 417-436) and shows no steric crash when docking the sialyl-2-3-lactose molecule into the substrate binding site of the B/Lee/40 model, indicating a correct stereochemistry. Therefore the B/Lee/40 model was used to guide the design of influenza B HA subunit vaccines.

### Results and Discussion

[0400] Depiction of Domain Boundaries for B/Lee/40 HA constructs. The selected boundary domains are highlighted in the sequence below as follows: HA1-1 boundaries are single-underlined (T48-K340 of SEQ ID: 36), and HA1-2 boundaries are double-underlined (K60-G299 of SEQ ID: 36). Detailed descriptions of each subunit design and boundary domains are given below.

(SEQ ID NO:36)
MKAIIVLLMVVTSNADRICTGITSSNSPHVVKTATQGEVNVTGVIPLTTTPTKSHFANLK 60
GTQTRGKLCPNCFNCTDLDVALGRPKCMGNTPSAKVSILHEVKPATSGCFPIMHDRTKIR 120
QLPNLLRGYENIRLSTSNVINTETAPGGPYKVGTSGSCPNVANGNGFFNTMAWVIPKDNN 180
KTAINPVTVEVPYICSEGEDQITVWGFHSDDKTQMERLYGDSNPQKFTSSANGVTTHYVS 240
QIGGFPNQTEDEGLKQSGRIVVDYMVQKPGKTGTIVYQRGILLPQKVWCASGRSKVIKGS 300
LPLIGEADCLHEKYGGLNKSKPYYTGEHAKAIGNCPIWVKTPLKLANGTKYRPPAKLLKE 360
RGFFGAIAGFLEGGWEGMIAGWHGYTSHGAHGVAVAADLKSTQEAINKITKNLNYLSESL 420
VKNLQRLSGAMNELHDEILELDEKVDDLRADTISSQIELAVLLSNEGIINSEDEHLLALE 480
RKLKKMLGPSAVEIGNGCFETKHKCNQTCLDRIAAGTFNAGDFSLPTFDSLNITAASLND 540
DGLDNHTILLYYSTAASSLAVTLMIAIFIVYMVSRDNVSCSICL 584

[0401] The coordinates of the simulated B/Lee/40 model are available in Protein Data Bank with the accession code 1TX1. The pdb file was converted to the MMDB (Molecular Modeling Data Base) format by using VAST (Vector Alignment Search Tool) search (http://www.ncbi.nlm.nih.gov/Structure/VAST/vastsearch.html). The model of 1TX1 structure then was viewed by Cn3D and the structure was saved in MMDB format. Based on the same principal used to design influenza A HA1-1 and HA1-2 constructs, the domain boundaries of B/Lee/40 HA-1 and HA1-2 were pinpointed by examining the model structure. B/Lee/40 HA1-1 (SEQ ID NO: 38) includes the epitope-concentrated globular top, the membrane distal β-sheet and an additional β-sandwich located underneath the membrane distal β-sheet. The amino terminus of HA1-1 starts from residue 48 and ends at residue 340 (TTTPTK (SEQ ID NO: 279) . . . - . . . CPIWVK (SEQ ID NO: 280)) of SEQ ID NO: 36). The B/Lee/40 HA1-2 (SEQ ID NO: 39) was designed by removing the β-sandwich from HA1-1. HA1-2 starts from residue 60 and ends at residue 299 (KGTQTR (SEQ ID NO: 281) . . . - . . . SKVIKG (SEQ ID NO: 282)) of SEQ ID NO: 36. In order to confirm the boundary selection, other independent methods were also employed. The first method used was the primary sequence alignment. The sequence of A/Aichi/2/68 (SEQ ID NO: 35) was aligned with B/Lee/40 (SEQ ID NO: 36) sequence. The boundaries of A/Aichi/2/68 HA1-1 (SEQ ID NO: 40) (residues 60-326 QSSSTG (SEQ ID NO: 283) . . . - . . . CPKYVK (SEQ ID NO: 284)) and HA1-2 (SEQ ID NO: 41) (residues 72-287; HRILDG (SEQ ID NO: 285) . . . - . . . SIMRSD (SEQ ID NO: 286)) were aligned closely to those of B/Lee/40, supporting the boundary selections using simulated model. One residue adjustment was made to avoid exposing hydrophobic residues and either end of the construct. Thus, the 3-dimensional structure prediction matches very well with primary sequence alignment.

[0402] The second method used was the secondary structure prediction. The domain boundary is usually located in the loop or turn region without invading much of the secondary structure elements such as the α-helix and the β-sheet, especially the center of the α-helix bundle or the β-sheet. This criterion was used to double check if the boundary selection made form simulated 3-D structure is in agreement with independent secondary structure prediction. The program PHD (http://ca.expasy.org/tools→Proteomics and sequence analysis tools→Secondary and tertiary structure tools→PredictProtein) was used to perform the secondary structure prediction. Other than two of the HA1-2 carboxy-terminal residues overlapping with a short α-helix (5 amino acids), all other boundary residues fall in the loop regions, indicating a reasonable boundary selection. PHD results is listed as the following, where AA is the amino acid sequence; OBS_sec is the observed secondary structure: H=helix, E=extended sheet, blank=other (loop); PROF_sec: PROF predicted secondary structure: H=helix, E=extended (sheet), blank=other (loop), PROF=PROF: Profile network prediction HeiDelberg; Rel_sec: reliability index for PROFsec prediction (0=low to 9=high)

[0403] For the brief presentation strong predictions marked by ‘*’; SUB_sec: subset of the PROFsec prediction, for all residues with an expected average accuracy >82% NOTE: for this subset the following symbols are used: L: is loop (for which above ‘ ’ is used) .: means that no prediction is made for this residue, as the reliability is: Rel<5; O_{—}3_acc: observerd relative solvent accessibility (acc) in 3 states: b=0-9%, i=9-36%, e=36-100%; P_{—}3_acc: PROF predicted relative solvent accessibility (acc) in 3 states: b=0-9%, i=9-36%, e=36-100%; Rel_acc: reliability index for PROFacc prediction (0=low to 9=high).

[0404] For the brief presentation strong predictions marked by ‘*’; SUB_acc: subset of the PROFacc prediction, for all residues with an expected average correlation >0.69 (tables in header).

[0405] NOTE: for this subset the following symbols are used:
[0406] I: is intermediate (for which above ‘ ’ is used)

[0407] .: means that no prediction is made for this residue, as the reliability is: Rel<4.

| | | |
|---|---|---|
| | ....,....1....,....2....,....3....,....4....,....5 | |
| AA | MKAIIVLLMVVTSNADRICTGITSSNSPHVVKTATQGEVNVTGVIPLTTT | |
| OBS_sec | | |
| PROF_sec | EEEEEEEEEE EEEEEEEE EEEEEE EEEEEEEEEE | |
| Rel_sec | 90456542111257762677454037753444441276147765653203 | |
| SUB_sec | L..EEE......LLLL.EEE.E...LLL........LL..EEEEEE.... | |
| O_3_acc | bbbbbbbbbbbbbbbbbbbbbbbbbbbbbbbbbbbbbbbbbbbbbbbbbb | |
| P_3_acc | ee bbbbbbbbbeeb bbbbbbb eeee b bb eeebeb b bbe | |
| Rel_acc | 33169997521111032778921201222233322135234021321012 | |
| SUB_acc | ...bbbbbb........bbbb................e..b......... | |
| | ....,....6....,....7....,....8....,....9....,....10 | |
| AA | PTKSHFANLKGTQTRGKLCPNCFNCTDLDVALGRPKCMGNTPSAKVSILH | |
| OBS_sec | | |
| PROF_sec | EEEE EEEEEE EEEE | |
| Rel_sec | 67752200245344675222033211232342043234337875203787 | |
| SUB_sec | LLLL......L...LLL.......................LLLL...EEE | |
| O_3_acc | bbbbbbbbbbbbbbbbbbbbbbbbbbbbbbbbbbbbbbbbbbbbbbbbbb | |
| P_3_acc | eee bbe eeeeeee eb bbbbbbbbb b b ee eeeeb bbb | |
| Rel_acc | 23201011020002300210201031223343310100210221541265 | |
| SUB_acc | ..............................b.............eb..bb | |
| | ....,....11.1.,....12.1.,....13.1.,....14.1.,....15.1 | |
| AA | EVKPATSGCFPIMHDRTKIRQLPNLLRGYENIRLSTSNVINTETAPGGPY | |
| OBS_sec | | |
| PROF_sec | EE HHHHHHHHHHH EEEEE EE | |
| Rel_sec | 50566441224778858887664221002304663021003444556531 | |
| SUB_sec | E.LLL......LLLLHHHHHHH..........EE..........LLLL.. | |
| O_3_acc | bbbbbbbbbbbbbbbbbbbbbbbbbbbbbbbbbbbbbbbbbbbbbbbbbb | |
| P_3_acc | b eeee bbbbb e b ebbebbee eeb eeeeee | |
| Rel_acc | 12210110221001337264350314531332301200011120132011 | |
| SUB_acc | ................e.bi.b...be....................... | |
| | ....,....16.1.,....17.1.,....18.1.,....19.1.,....20.1 | |
| AA | KVGTSGSCPNVANGNGFFNTMAWVIPKDNNKTAINPVTVEVPYICSEGED | |
| OBS_sec | | |
| PROF_sec | HHHHHHHHHHH EEEEEE | |
| Rel_sec | 24431001255662036787888752378864236641012244157874 | |
| SUB_sec | .........LLLL...HHHHHHHHH..LLLL...LL.........LLLL. | |
| O_3_acc | bbbbbbbbbbbbbbbbbbbbbbbbbbbbbbbbbbbbbbbbbbbbbbbbbb | |
| P_3_acc | bbbbbbee ee bbbbbbb bbeeeee ee ebeb b b eee | |
| Rel_acc | 11111012110301026314921522122321112112322203203212 | |
| SUB_acc | ................b..bb..b.......................... | |
| | ....,....21.1.,....22.1.,....23.1.,....24.1.,....25.1 | |
| AA | QITVWGFHSDDKTQMERLYGDSNPQKFTSSANGVTTHYVSQIGGFPNQTE | |
| OBS_sec | | |
| PROF_sec | EEEEEEEE HHHHHH EEEEE EEEEEEEE | |
| Rel_sec | 47897532588742544320368853775200122343201275331035 | |
| SUB_sec | .EEEEE..LLLL..H......LLLL.EEE.............LL.....L | |
| O_3_acc | bbbbbbbbbbbbbbbbbbbbbbbbbbbbbbbbbbbbbbbbbbbbbbbbbb | |
| P_3_acc | bbbbbbbbb eeee b eeeeeeb b b e e e ebee b e | |
| Rel_acc | 19696993033223122210203213224011122211311001202001 | |
| SUB_acc | .bbbbbb.....................b..................... | |
| | ....,....26.1.,....27.1.,....28.1.,....29.1.,....30.1 | |
| AA | DEGLKQSGRIVVDYMVQKPGKTGTIVYQRGILLPQKVWCASGRSKVIKGS | |
| OBS_sec | | |
| PROF_sec | EEEEEEEEE EEEEEE EEE EEEEE EEEE | |
| Rel_sec | 56754320377888983577247886434023022235520330245401 | |
| SUB_sec | LLLL.....EEEEEEE.LLL..EEEE...........EE.......E... | |
| O_3_acc | bbbbbbbbbbbbbbbbbbbbbbbbbbbbbbbbbbbbbbbbbbbbbbbbbb | |
| P_3_acc | eee bbbbbbb bbbb ee b b bbbbbb bb b eeb bbe e | |
| Rel_acc | 17211105270744553301222473010244520230221020211103 | |
| SUB_acc | .e.....b.b.bibbb.......ib.....bbb................. | |
| | ....,....31.1.,....32.1.,....33.1.,....34.1.,....35.1 | |
| AA | LPLIGEADCLHEKYGGLNKSKPYYTGEHAKAIGNCPIWVKTPLKLANGTK | |
| OBS_sec | | |
| PROF_sec | HHH HHHHH HHHHH | |
| Rel_sec | 32233333000113432246764334340342334133220003551573 | |
| SUB_sec | ...................LLL......................HH.LL. | |
| O_3_acc | bbbbbbbbbbbbbbbbbbbbbbbbbbbbbbbbbbbbbbbbbbbbbbbbbb | |
| P_3_acc | e e e bb ee b bbbebbe be bb bbbbb | |
| Rel_acc | 10010011112110110111101210102102111021712452461321 | |
| SUB_acc | ......................................b..bb.bb.... | |
| | ....,....36.1.,....37.1.,....38.1.,....39.1.,....40.1 | |
| AA | YRPPAKLLKERGFFGAIAGFLEGGWEGMIAGWHGYTSHGAHGVAVAADLK | |
| OBS_sec | | |
| PROF_sec | EEEEHHHH EEEEE H | |
| Rel_sec | 56853211324203110113404531100120021023564325530623 | |
| SUB_sec | LLLL...................L..............LL...EE..L.. | |
| O_3_acc | bbbbbbbbbbbbbbbbbbbbbbbbbbbbbbbbbbbbbbbbbbbbbbbbbb | |
| P_3_acc | b eee be bbbbbbbbbbbbbb bbbbbbbbbbbbbb bbbbbbb e | |
| Rel_acc | 00011411202355999999623520456353043010011315264032 | |
| SUB_acc | .....e......bbbbbbbbb..b..bbb.b..b.........b.bb... | |
| | ....,....41.1.,....42.1.,....43.1.,....44.1.,....45.1 | |
| AA | STQEAINKITKNLNYLSELEVKNLQRLSGAMNELHDEILELDEKVDDLRA | |
| OBS_sec | | |
| PROF_sec | HHHHHHHHHHHHHHHHHHHHHHHHHHHHHHHHHHHHHHHHHHHHHH HHH | |
| Rel_sec | 47888989873212477733101234446677898888878756210111 | |
| SUB_sec | .HHHHHHHHH.....HHH..........HHHHHHHHHHHHHHHH...... | |
| O_3_acc | bbbbbbbbbbbbbbbbbbbbbbbbbbbbbbbbbbbbbbbbbbbbbbbbbb | |
| P_3_acc | bbbebbeebbe b bbee beebeeb ebbeebbe beeb eebee | |
| Rel_acc | 28049825725342322312063124534063444467553254223101 | |
| SUB_acc | .b.ebb.eb.e.b........e...eb.e.b.ebbeibee..ee...... | |
| | ....,....46.1.,....47.1.,....48.1.,....49.1.,....50.1 | |
| AA | DTISSQIELAVLLSNEGIINSEDEHLLALERKLKKMLGPSAVEIGNGCFE | |
| OBS_sec | | |
| PROF_sec | HHHHHHHHHHHHHH HHHHHHHHHHHHHHHHHHHH EEE | |
| Rel_sec | 03645477777753464114550578879888887664424540663252 | |
| SUB_sec | ..H.H.HHHHHHH..L....LL.HHHHHHHHHHHHHH....H..LL..E. | |
| O_3_acc | bbbbbbbbbbbbbbbbbbbbbbbbbbbbbbbbbbbbbbbbbbbbbbbbbb | |
| P_3_acc | bbbb bb bbbbb eebb e e b eb e b e b e bee eebbbb | |
| Rel_acc | 04450592968651122001021323439443944173428232012340 | |
| SUB_acc | .bbb.bb.bbbbb.............i.bie.bie.b.e.b.......b. | |
| | ....,....51.1.,....52.1.,....53.1.,....54.1.,....55.1 | |
| AA | TKHKCNQTCLDRIAAGTFNAGDFSLPTFDSLNITAASLNDDGLDNHTILL | (SEQ ID NO: 36) |
| OBS_sec | | |
| PROF_sec | EEEE HHHHHHHH HHHH EEEEEEEEE EEEEE | |
| Rel_sec | 22003402344311355466523223103101002476217776303665 | |
| SUB_sec | ...............LL.LLL...............EE.........EEE | |
| O_3_acc | bbbbbbbbbbbbbbbbbbbbbbbbbbbbbbbbbbbbbbbbbbbbbbbbbb | |
| P_3_acc | b beb e bbbbb bbbb ee eebbe beb bbeb eeeeeeb bbb | |
| Rel_acc | 42120312620271012211330320211224131235303222133868 | |
| SUB_acc | b.......b...b..................e.....b.........bbb | |
| | ....,....56.1.,....57.1.,....58.1. | (SEQ ID NO:36) |
| AA | YYSTAASSLAVTLMIAIFIVYMVSRDNVSCSICL | |
| OBS_sec | | |
| PROF_sec | EEEHHHHHHHHHHHHHHHHHHH EEEEEEE | |
| Rel_sec | 4310021478888888776321006740346860 | |
| SUB_sec | ........HHHHHHHHHHH.....LL....EEE. | |
| O_3_acc | bbbbbbbbbbbbbbbbbbbbbbbbbbbbbbbbbb | |
| P_3_acc | bbbbbbbbbbbbbbbbbbbbbbbee eb b bbb | |
| Rel_acc | 6362366679999996998517101010152400 | |
| SUB_acc | b.b..bbbbbbbbbbbbbbb.b.......b.b.. | |

[0408] The third tool that used is the hydrophobicity analysis. In general, the structural core of a protein tends to be a hydrophobic cluster flanked by stretch of hydrophilic residues. Therefore the predicted boundaries should not locate in the center of hydrophobic core, rather should reside in the flanking hydrophilic regions. Hydrophobicity of B/Lee/40 HA sequence (SEQ ID NO: 36) was plotted using ProtScale (http://ca.expasy.org/tools→Primary structure analysis→ProtScale). The hydrophobicity analysis of B/Lee/40 sequence confirmed that the selected boundaries were in the hydrophilic regions of the protein (FIG. 2). The hydrophobicity strength used in the plot is listed in the following table:

SEQUENCE LENGTH: 584

Using the scale Hphob./Kyte & Doolittle, the individual values
for the 20 amino acids are:

| | | | | | | | | | | | |
|---|---|---|---|---|---|---|---|---|---|---|---|
| Ala: | 1.800 | Arg: | −4.500 | Asn: | −3.500 | Asp: | −3.500 | Cys: | 2.500 | Gln: | −3.500 |
| Glu: | −3.500 | Gly: | −0.400 | His: | −3.200 | Ile: | 4.500 | Leu: | 3.800 | Lys: | −3.900 |
| Met: | 1.900 | Phe: | 2.800 | Pro: | −1.600 | Ser: | −0.800 | Thr: | −0.700 | Trp: | −0.900 |
| Tyr: | −1.300 | Val: | 4.200 | Asx: | −3.500 | Glx: | −3.500 | Xaa: | −0.490 | | |

[0409] In order to identify the HA 1-1 and HA1-2 domain boundaries of other influenza B molecules, such as B/Malaysia/2506/2004 (SEQ ID NO: 42), B/Ohio/1/2005 (SEQ ID NO: 43), B/Victoria/2/87 lineage (SEQ ID NO: 787) and B/Shanghai/361/2002 (SEQ ID NO: 44), and B/Yamagata/16/88 lineage (SEQ ID NO: 213), each HA sequence was aligned with B/Lee/40 HA sequence (SEQ ID NO: 36). The results indicated that influenza B HA proteins are much more conserved compared to influenza A HA proteins, especially in the domain boundary sequences. Thus, the boundaries identified in B/Lee/40 were used to direct boundary selections of other influenza B strains. The resulting domain boundaries for each strain are summarized below.

[0410] B/Malaysia/2506/2004: HA1-1 44-337 (SEQ ID NO: 45) (TTTPTK (SEQ ID NO: 287)-CPIWVK (SEQ ID NO: 288)) HA1-2 56-296 (SEQ ID NO: 46) (KGTETR (SEQ ID NO: 289)-SKVIKG (SEQ ID NO: 290))

[0411] B/Ohio/1/2005: HA1-1 33-326 (SEQ ID NO: 47) (TTTPTK (SEQ ID NO: 291)-CPIWVK (SEQ ID NO: 292)) HA1-2 45-285 (SEQ ID NO: 48) (KGTKTR (SEQ ID NO: 293)-SKVIKG (SEQ ID NO: 294))

[0412] B/Shanghai/361/2002: HA1-1 33-325 (SEQ ID NO: 49) (TTTPIK (SEQ ID NO: 295)-CPIWVK (SEQ ID NO: 296)) HA1-2 45-284 (SEQ ID NO: 50) (KGTRTR (SEQ ID NO: 297)-SKVIKG (SEQ ID NO: 298))

| | | | |
|---|---|---|---|
| BMa1 | ----IVLLMVVTSNADRICTGITSSNSPHVVKTATQGEVNVTGVIPLTTT | 50 | (SEQ ID NO:42) |
| BOhi | ---------------DRICTGITSSNSPHVVKTATQGEVNVTGVIPLTTT | | (SEQ ID NO:43) |
| BLee | MKAIIVLLMVVTSNADRICTGITSSNSPHVVKTATQGEVNVTGVIPLTTT | | (SEQ ID NO:36) |
| BSha | ---------------DRICTGITSSNSPHVVKTATQGEVNVTGVIPLTTT | | (SEQ ID NO:44) |
| | *********************************** | | |
| BMa1 | PTKSHFANLKGTETRGKICPKCLNCTDLDVALGRPKCTGNIPSARVSILH | 100 | |
| BOhi | PTKSHFANLKGTKTRGKLCPKCLNCTDLDVALGRPKCTGNIPSAEVSILH | | |
| BLee | PTKSHFANLKGTQTRGKLCPNCFNCTDLDVALGRPKCMGNTPSAKVSILH | | |
| BSha | PIKSHFANLKGTRTRGKICPDCLNCTDLDVALGRPMCVGTTPSAKASILH | | |
| | * **********.*******.*:************ * *. ***..**** | | |
| BMa1 | EVRPVTSGCFPIMHDRTKIRQLPNLLRGYEHIRLSTHNVINAENAPGGSY | 150 | |
| BOhi | EVRPVTSGCFPIMHDRTKIRQLPNLLRGYEHIRLSTHNVINAEKAPGGPY | | |
| BLee | EVKPATSGCFPIMHDRTKIRQLPNLLRGYENIRLSTSNVINTETAPGGPY | | |
| BSha | EVRPVTSGCFPIMNDRTKIRQLPNLLRGYENIRLSTQNVIDAEKALGGPY | | |
| | **:*.*************************:***** ***::*.* **.* | | |
| BMa1 | KIGTSGSCPNVTNGNGFFATMAWAVPKNDNNKTATNSLTIEVPYICTEGE | 200 | |
| BOhi | KIGTSGSCPNVTNGNGFFATMAWAVPKMDNNKTATNSLTIEVPYICTEGE | | |
| BLee | KVGTSGSCPNVANGNGFFNTMAWVIPK-DNNKTAINPVTVEVPYICSEGE | | |
| BSha | RLGTSGSCPNATSKSGFFATMAWAVPK-DNNKNATNPLTVEVPYICTEGE | | |
| | ::********.:. .*** ****.:** ****.* *.:*:******:*** | | |
| BMa1 | DQITVWGFHSDNEAQMAKLYGDSKPQKFTSSANGVTTHYVSQIGGFPNQT | 250 | |
| BOhi | DQITIWGFHSDSETQMAKLYGDSKPQKFTSSANGVTTNYVSQIGGFPNQT | | |
| BLee | DQITVWGFHSDDKTQMERLYGDSNPQKFTSSANGVTTHYVSQIGGFPNQT | | |
| BSha | DQITVWGFHSDDKTQMKNLYGDSNPQKFTSSANGVTTHYVSQIGGFPDQT | | |
| | ****:******.::** .*****:***********************:** | | |
| BMa1 | EDGGLPQSGRIVVDYMVQKSGKTGTITYQRGILLPQKVWCASGRSKVIKG | 300 | |
| BOhi | EDGGLPQSGRIVVDYMVQKSGKTGTITYQRGILLPQKVWCASGRSKVIKG | | |
| BLee | EDEGLKQSGRIVVDYMVQKPGKTGTIVYQRGILLPQKVWCASGRSKVIKG | | |
| BSha | EDGGLPQSGRIVVDYMVQKPGKTGTIVYQRGVLLPQKVWCASGRSKVIKG | | |
| | ** ** *************.******.****:****************** | | |
| BMa1 | SLPLIGEADCLHEKYGGLNKSKPYYTGEHAKAIGNCPIWVKTPLKLANGT | 350 | |
| BOhi | SLPLIGEADCLHEKYGGLNKSKPYYTGEHAKAIGNCPIWVKTPLIQANGT | | |
| BLee | SLPLIGEADCLHEKYGGLNKSKPYYTGEHAKAIGNCPIWVKTPLKLANGT | | |
| BSha | SLPLIGEADCLHEKYGGLNKSKPYYTGEHAKAIGHCPIWVKTPLKLANGT | | |
| | **********************************:*************** | | |
| BMa1 | KYRPPAKLLKER-------------------------------------- | 400 | |
| BOhi | KYRPPAKLLKERGF------------------------------------ | | |
| BLee | KYRPPAKLLKERGFFGAIAGFLEGGWEGMIAGWHGYTSHGAHGVAVAADL | | |
| BSha | KYRP---------------------------------------------- | | |
| | **** | | |

[0413] B/Lee/40 HA1-1 construct design (SEQ ID NO: 38). For this construct, five (5) anticipated conserved disulfide bonds were preserved by making the amino terminal truncation before the Cysteine at position 69 and the carboxyl-terminal truncation after the Cysteine at position 335 of SEQ ID NO: 36. The likely disulfide pairings are as the following: C69 and C72, C75 and C87, C109 and C158, C195 and C289, C309 and C335 of SEQ ID NO: 36. Using the simulated structures and the MMDB to check secondary structures the amino terminal truncation was made at the Theonine at position 48, right after the β-strand kink introduced by Proline 46 followed by, Leucine 47 of SEQ ID NO: 36, such that the preceding β-strand [TGVI, SEQ ID NO: 299, residues 42-45 of SEQ ID NO: 36] was totally eliminated while the entire short β-strand formed by residues TTTP (SEQ ID NO: 300) [residues 48-51 of SEQ ID NO: 36] was preserved. The carboxyl-terminal truncation was made at the end of β-strand PIWV (SEQ ID NO: 301) [residues 336-340 of SEQ ID NO: 36] following the Cysteine at position 335 such that the carboxyl-terminal tail which interacts with HA2 was completely eliminated. Six α-strands including the C-terminal β-strand form a stable β-sandwich defined by β-strands PIWV (SEQ ID NO: 301) [residue 336-340 of SEQ ID NO: 36], PYYTG (SEQ ID NO: 302) [residues 322 to 326 of SEQ ID NO: 36] and TTTP (SEQ ID NO: 300) [residues 48-51 of SEQ ID NO: 36] (lower β-pleated sheet), and the β-strands DCLHE (SEQ ID NO: 303) [residues 308-312 of SEQ ID NO: 38], YGGLN (SEQ ID NO: 304) [residue 314-318 of SEQ ID NO: 36] and KAIGN (SEQ ID NO: 305) [residues 330-334 of SEQ ID NO: 36] (top β-pleated sheet). This set of β-pleated sheet includes both the amino-terminus and carboxyl-terminus within one stable secondary structure element. Such truncations were made to believe resulting a compact domain structure.

[0414] B/Lee/40 HA1-2 construct design (SEQ ID NO: 39). For this construct four (4) anticipated conserved disulfide bonds were preserved by making the amino-terminal truncation before the Cysteine at position 69 and the carboxyl-terminal truncation after the Cysteine at position 289 of SEQ ID NO: 36. Using the simulated structure and the MMDB to check secondary structures the amino-terminal truncation was made in the loops that connect two distinct sets of β-pleated sheets. The amino-terminal truncation was made at the Lysine at position 60, such that the β-strand comprising residues 62-66 of SEQ ID NO: 36 [TQTRG, SEQ ID NO: 306] of the membrane-distal set of β-strands remained wholly intact, while the membrane-proximal β-strand [TTTP, SEQ ID NO: 300, residues 48-51 of SEQ ID NO: 36] that forms part of HA1-1 was completely eliminated. The carboxyl-terminal truncation was made at the Serine 300 of SEQ ID NO: 36. Truncation at this position preserved secondary structure such that the membrane-distal β-strand [KVIKG, SEQ ID NO: 307, residues 295-299 of SEQ ID NO: 36] remained intact while the membrane-proximal β-strand [DCLHE, SEQ ID NO: 308, residues 308-312 of SEQ ID NO: 36] was eliminated. The membrane-distal β-pleated sheets comprising β-strands TQTRG (SEQ ID NO: 306) [residues 62-66 of SEQ ID NO: 36], SILHEV (SEQ ID NO: 309) [residues 97-102 of SEQ ID NO: 36], and KVIKG (SEQ ID NO: 307) [residues 295-299 of SEQ ID NO: 36] serve as the stabilizing secondary structure element that is believed to conclude a compact domain structure.

[0415] B/Malaysia/2506/2004, B/Ohio/1/2005 and B/Shanghai/361/2002 follow the same reference structure as described above.

### Example 3

### Cloning and Expression of Recombinant Flagellin-Hemagglutinin Fusion Proteins in E. coli

### Materials and Methods

[0416] Cloning of HA influenza A subunits. Subunits of the HA globular head from several strains of influenza. A were cloned and expressed alone or as fusions with flagellin. We also expressed in fusion with the HA globular head domain, two proteins widely used as carrier proteins in conjugated vaccines. CRM-197 is a mutated diphtheria toxin (DTx) from Corynebacterium diphtheriae and LTB, is E. coli heat labile toxin B subunit.

[0417] These constructs were generated in one of four different methodologies:

[0418] Method #1: In this protocol, a fusion gene comprising flagellin (STF2) (SEQ ID NO: 212) and the HA subunit was codon-optimized for E. coli expression and obtained from a commercial vendor (DNA2.0 Inc., Menlo Park, Calif.) by chemical synthesis. The gene was excised with NdeI and BlpI enzymes, the insert fragment was gel purified and ligated to pET24a (Novagen, San Diego, Calif.) which had been digested with NdeI and BlpI and treated with bacterial alkaline phosphatase (BAP).

[0419] Method #2: For facile cloning of genes in fusion with flagellin, a cassette plasmid containing a unique BlpI site at the 3′ end of the flagellin (STF2) gene (SEQ ID NO: 212) was generated. This was done by introducing a silent mutation at nucleotides 5′-GTGCTGAGCCTGTTACGT-3′ (SEQ ID NO: 310) [nt 1501 to 1518 of SEQ ID NO: 212] of STF2 creating the unique BlpI site in the plasmid cassette, pET24/STF2.blp (SEQ ID NO: 51). Synthetic genes for each target antigen were codon-optimized for E. coli expression and obtained from a commercial vendor (DNA2.0 Inc., Menlo Park, Calif.). The synthetic genes were excised with BlpI enzyme and ligated by compatible ends to pET24/STF2.blp which had been treated with BlpI and BAP.

[0420] Method #3: Using forward and reverse primers (Keck Foundation BRLK, Yale University, New Haven, Conn.; Midland Certified Reagent Company, Midland, Tex.) as indicated for each construct, PCR amplification was performed using the DNA templates shown in each table. The PCR product was subjected to BlpI digestion, gel-purified and ligated to pET24/STF2.blp (SEQ ID NO: 51) vector previously prepared by BlpI digestion and BAP treatment.

[0421] Method #4: A plasmid cassette, pET24/STF2.5G (SEQ ID NO: 52), was generated by introducing a flexible heptamer linker, Ser-Gly-Ser-Gly-Ser-Gly-Ser (S-G-S-G-S-G-S (SEQ ID NO: 311)) at the 3′ end of the STF2 gene. A unique BamHI site was created in the linker to facilitate cloning of HA subunit fragments in fusion with flagellin. Synthetic genes codon-optimized for expression in E. coli were obtained from a commercial vendor (DNA2.0 Inc., Menlo Park, Calif.), excised from the parental plasmids with BamHI and BlpI restriction endonucleases, and ligated by compatible ends to the pET24/STF2 cassette that had previously been digested with BamHI and BAP-treated.

[0422] In each case, the constructed plasmids were used to transform competent E. coli TOP10 cells and putative recombinants were identified by PCR screening and restriction mapping analysis. The integrity of the constructs was verified by DNA sequencing and they were used to transform the expression host, BLR3 (DE3) (Novagen, San Diego, Calif.; Cat #69053). Transformants were selected on plates containing kanamycin (50 μg/mL), tetracycline (5 μg/mL) and glucose (0.5%). Colonies were picked and inoculated into 2 ml of LB medium supplemented with 25 μg/ml kanamycin, 12.5 μg/ml tetracycline and 0.5% glucose and grown overnight. Aliquots of these cultures were used to inoculate fresh cultures in the same medium formulation, which were cultured until they reached an OD₆₀₀=0.6, at which time protein expression was induced by the addition of 1 mM IPTG and culturing for 3 hours at 37° C. The cells were harvested and analyzed for protein expression.

[0423] SDS-PAGE and Western blot: Protein expression and identity were determined by gel electrophoresis and immunoblot analysis. Cells were harvested by centrifugation and lysed in Laemmli buffer. An aliquot of 10 μl of each lysate was diluted in SDS-PAGE sample buffer with or without 100 mM DTT as a reductant. The samples were boiled for 5 minutes and loaded onto a 10% SDS polyacrylamide gel and electrophoresed (SDS-PAGE). The gel was stained with Coomassie R-250 (Bio-Rad; Hercules, Calif.) to visualize protein bands. For western blot, 0.5 μl/lane cell lysate was electrophoresed and electrotransfered to a PVDF membrane and blocked with 5% (w/v) dry milk.

[0424] The membrane was then probed with either anti-flagellin antibody (Inotek; Beverly, Mass.) or influenza A PR/8/38 convalescent immune mouse serum. PR/8/34 immune serum was generated in BALB/c mice (Jackson Laboratory, Bar Harbor, Me.) that received an experimentally determined sublethal challenge dose of 8×10¹ egg infectious dosages (EID) of PR/8/34 influenza virus. Animals were then allowed to convalesce for >21 days post-infection at which time immune serum was isolated and clarified. After probing with alkaline phosophatase-conjugated secondary antibodies (Pierce; Rockland, Ill.), protein bands were visualized with an alkaline phosphatase chromogenic substrate (Promega, Madison, Wis.). Bacterial clones which yielded protein bands of the correct molecular weight and reactive with the appropriate antibodies were selected for production of protein for use in biological assays.

[0425] The constructs derived from the HA of A/Puerto Rico/8/34 strain (PR8) (SEQ ID NO: 1) and listed in Table 1 were made by the synthetic gene route as described in Method #1 and Method #4. Similarly, the constructs derived from the A/Viet Nam/1203/2004 strain (SEQ ID NO: 2) are shown in Table 2, the constructs derived from the HA of A/Indonesia/2005 strain (IND) (SEQ ID NO: 3) are described in Table 3, and those from A/New Calcdonia/12/99 strain (NC) (SEQ ID NO: 4) are described in Tables 4. “IND” as used herein, refers to “Indonesia.” Where appropriate, the DNA primers and DNA templates used in the PCR amplification reaction are listed in the same table.

TABLE 1
PR8 HA constructs for expression in E coli

| SEQ ID NO: | Construct | Method |
|---|---|---|
| 53 | STF2.HA1-1 | #4 |
| 54 | STF2.HA1-1.his | #4 |
| 55 | STF2.HA1-2 | #1 |
| 56 | STF2.HA1-2mut | #1 |
| 57 | STF2.HA1-3 | #1 |
| 58 | STF2.HA1-3mut | #1 |
| 59 | HA1-1 | #1 |
| 60 | HA1-1.his | #1 |
| 61 | HA1-2.his | #1 |
| 62 | CRM.HA1-2 | #1 |
| 63 | LTB.HA1-2 | #1 |

[0426] TABLE 2
VN HA constructs for expression in E coli

| | | | FOR | REV | DNA |
|---|---|---|---|---|---|
| | | | Primer | Primer | Template |
| SEQ | | | SEQ | SEQ | SEQ |
| ID NO: | Construct | Method | ID NO: | ID NO: | ID NO: |
| 64 | STF2.HA1-1 | #3 | 65 | 66 | 67 |
| 68 | STF2.HA1-2 | #3 | 69 | 70 | 67 |
| 71 | STF2.HA1-2mut | #2 | N/A | N/A | 72 |

[0427] TABLE 3
IND HA constructs for expression in E coli

| | | | FOR | REV | DNA |
|---|---|---|---|---|---|
| | | | Primer | Primer | Template |
| SEQ | | | SEQ | SEQ | SEQ |
| ID NO: | Construct | Method | ID NO: | ID NO: | ID NO: |
| 73 | STF2.HA1-1 | #3 | 74 | 66 | 75 |
| 76 | STF2.HA1-2 | #3 | 69 | 77 | 75 |
| 78 | STF2.HA1-2mut | #2 | N/A | N/A | 79 |

[0428] TABLE 4
NC HA constructs for expression in E coli

| | | | FOR | REV | DNA |
|---|---|---|---|---|---|
| | | | Primer | Primer | Template |
| SEQ | | | SEQ | SEQ | SEQ |
| ID NO: | Construct | Method | ID NO: | ID NO: | ID NO: |
| 80 | STF2.HA1-1 | #3 | 81 | 82 | 83 |
| 84 | STF2.HA1-2 | #3 | 85 | 86 | 83 |
| 87 | STF2.HA1-2mut | #2 | N/A | N/A | 88 |

### Results

[0429] Protein carriers have widespread application in human vaccines. The cross-reactive reactive material (CRM₁₉₇) of diphtheria toxin is considered to be advantageous as a carrier molecule in the formulation of several conjugate vaccines. Exemplary carriers include E. coli heat labile enterotoxin (LT) and its B subunit (LTB), Tetanus toxoid (TT) and cholera toxin (CT). Using CRM₁₉₇ and LTB as representatives of this group of carrier proteins, we have generated constructs in which the globular head of HA of (A/Puerto Rico/8/34 strain (PR8) (SEQ ID NO: 1) is fused to the 3′ end of either CRM197 gene or LTB gene as described in Method #1 generating the constructs CRM.HA1-2 (SEQ ID NO: 62) and LTB.HA1-2 (SEQ ID NO: 63). The constructs were verified by DNA sequencing and used to transform the expression host, BLR3 (DE3) (Novagen, San Diego, Calif.; Cat #69053).

[0430] Transformants were selected on plates containing kanamycin (50 μg/mL), tetracycline (5 μg/mL) and glucose (0.5%). Several colonies were picked for an overnight culture which were was used to inoculate a fresh LB medium supplemented with 25 μg/ml kanamycin, 12.5 μg/ml tetracycline and 0.5% glucose. At an OD600=0.6 protein expression was induced with 1 mM IPTG for 3 h at 37° C. The cells were harvested and an aliquot of the lysate was analyzed on 10% SDS-PAGE by Coomassie blue staining and by immunoblot using PR/8/34 convalescent sera. In the case of CRM.HA1-2 construct several clones were picked and analyzed for expression by SDS-PAGE.

[0431] As assayed by Coomassie blue staining of the SDS-PAGE gel, all the clones displayed a band that migrated with an apparent MW 84 KDa and that corresponds to the predicted MW. The absence of this band in the control culture (without IPTG) indicates that it is specifically induced by IPTG. This observation was further confirmed when the cell extracts of two clones #5 and #6 was fractionated in the presence or absence of a reducing agent (5 mM DTT). While the recombinant protein whose disulphide bonds have been disrupted by treatment with DTT is not recognized by the cognate antibodies, the native recombinant protein is. Similarly, a clone expressing construct LTB.HA1-2 displays a band corresponding to the predicted molecular weight of 39.8 KDa, protein when induced with IPTG. The identity of LTB-HA1-2 fusion protein is confirmed by western blot analysis using mouse convalescent serum. This band is diminished in intensity when a reductant (β-mercaptoethanol) was present. This latter observation suggests that insufficient amount of reductant was most likely employed in the experiment. Taken together the data presented herein support the notion that the globular head of HA can be successfully fused to carrier proteins to generate conformational sensitive proteins.

### Cloning of Recombinant Flagellin-Hemagglutinin Fusion Proteins in E. coli

[0432] Cloning of HA Influenza B subunits. Subunits of the HA globular head from several strains of influenza B were cloned and expressed as fusions with flagellin. These constructs were generated by a two-step PCR.

[0433] The HA subunit was codon-optimized for E. coli expression and obtained from a commercial vendor (DNA2.0 Inc., Menlo Park, Calif.) by chemical synthesis. The HA1-1 or HA1-2 was PCR amplified using the synthesized DNA as templates. The flagellin (STF2) sequence (SEQ ID NO: 212) was derived from the plasmid pET24a-STF2.HA1-2. The STF2 DNA fragment was PCR amplified, and the C-terminal of the PCR product has a 28-30 bp overlap with the N-terminal sequence of the fusion HA subunit.

[0434] The STF2 and HA subunits were fused together by a 2^{nd} PCR. Using respective forward and reverse primers (Integrated DNA Technologies, Inc, Coralville, Iowa 52241) listed below, fusion protein DNA was amplified from the DNA templates also shown below. The PCR product was subsequently subjected to XbaI digestion, gel-purification and ligation to pET24a-STF2.HA1-2 that was previously digested with XbaI and SnaBI.

[0435] The constructs are listed below, where appropriate, the DNA primers and DNA templates used in the PCR amplification reaction are also listed.

FluB STF2.HA constructs for expression in E coli

| | | FOR | REV | DNA |
|---|---|---|---|---|
| | | Primer | Primer | Template |
| SEQ | | SEQ | SEQ | SEQ |
| ID NO: | Construct | ID NO: | ID NO: | ID NO: |
| 184 | STF2.HA1-1 (MAL) | 193, 195 | 194, 196 | 55, 183 |
| 186 | STF2.HA1-2 (MAL) | 193, 198 | 197, 199 | 55, 185 |
| 188 | STF2.HA1-2 (SH) | 193, 201 | 200, 202 | 55, 187 |
| 190 | STF2.HA1-2 (Lee) | 193, 204 | 203, 205 | 55, 189 |
| 192 | STF2.HA1-2 (Ohio) | 193, 207 | 206, 208 | 55, 191 |

[0436] In each case, the constructed plasmids were used to transform competent E. coli DH5α cells and putative recombinants were identified by restriction mapping. The integrity of the constructs was verified by DNA sequencing and was used to transform the expression host, BLR3 (DE3) (Novagen, San Diego, Calif.; Cat #69053). Transformants were selected on LB (Veggie peptone, EMD Bioscience, La Jolla, Calif.; Cat#71280; veggie yeast extract, EMD Bioscience, Cat# 71279;) plates containing kanamycin (35 μg/mL). Colonies were picked and inoculated into 2 ml of LB (Veggie) medium supplemented with 35 μg/ml kanamycin and grown overnight. Aliquots of these cultures were used to inoculate fresh cultures in the same medium formulation, which were cultured until OD₆₀₀=0.6 was reached. The protein expression was induced by the addition of 1 mM IPTG. The cells were harvested after 2 hours culturing at 37° C. and analyzed for protein expression.

[0437] SDS-PAGE and Western blot: Protein expression and identity were determined by gel electrophoresis and immunoblot analysis. Cells were harvested by centrifugation and lysed in Tris/NaCl (50 mM Tris, 200 mM NaCl, pH 8.0) buffer. Two aliquots of each lysate was diluted in SDS-PAGE sample buffer and boiled for 5 minutes. One aliquot sample was reduced by DTT (200 mM final concentration, EMD Bioscience, La Jolla, Calif. 92039; Cat#233155). The samples (1.5 μl/lane cell lysate) were loaded onto a 4-12% SDS polyacrylamide gel and electrophoresed (SDS-PAGE). The gel was stained with Coomassie R-250 (Bio-Rad; Hercules, Calif.) to visualize protein bands.

[0438] For western blot, the duplicated gel was electrophoresed and electrotransfered to a PVDF membrane and blocked with 5% (w/v) dry milk. The membrane was then probed with either anti-flagellin antibody (6H11, Inotek, Beverly, Mass.; Lot#1030B5) or ferret antiserum raised against B/Malaysia (2506/2004, CDC#2005741987). After probing with Horseradish Peroxidase (HRP)-conjugated secondary antibodies (1:10,000) (Goat anti-Mouse is from Jackson ImmunoResearch Laboratories; West Grove, Pa. Goat anti-Ferret is from Bethyl Laboratories; Montgomery, Tex.), protein bands were visualized after with addition of TMB, an HRP chromogenic substrate (Pierce; Rockland, Ill.; Cat#34018). The approximate molecular weight of STF2.HA1-1(MAL) is 84 kDa; and the approximate molecular weight of STF2.HA1-2 (MAL and SH) is ˜78 kDa. Two micrograms of STF2.4×M2e fusion protein was loaded as a positive control for the anti-flagellin antibody and a negative control for the anti-HA sera. Virus lysate (B/Malaysia/2506/04, CDC# 2005756250) was included in the experiment as a positive control for the anti-HA sera and a negative control for the anti-flagellin antibody. Commassie blue staining of the gel showed low induction of STF2.HA1-1(MAL) protein; but much stronger bands for STF2.HA1-2(MAL) and STF2.HA1-2(SH) proteins. Western blot analysis using anti-flagellin monoclonal antibodies (1:4000) exhibited a strong positive band around 84 kDa for lanes loaded with STF2.HA1-1(MAL), and around 75 kDa in lanes loaded with STF2.HA1-2(MAL) or STF2.HA1-2(SH). The induction pattern of each fusion protein on the Western is very similar to the result for the commassie blue stained gel. The level of the non-reduced and the reduced protein recognized by the anti-flagellin was comparable. The positive control for anti-flagellin (STF2.4×M2e) showed s single strong band, and the negative control exhibited no signal.

[0439] Western blot analysis using anti-HA polyclonal anti-sera (1:1000) exhibited a similar pattern as the blot with anti-flagellin, except that the reduced STF2.HA1-2 protein had a diminished signal compared to that of the non-reduced sample, indicating that a substantial portion of the anti-HA polyclonal antibodies in the antiserum recognize conformational epitopes formed by correct disulfide-bond formation while a small proportion of the antibodies in the anti-sera recognize linear epitopes that are not reliant on disulfide bound formation. Similar were observed using a capture ELISA assay. It is worth noting that anti-serum against B/Malaysia/2506/2004 (Victoria lineage) also recognizes B/Shanghai/361/2002, which belongs to Yamagata lineage. This result indicates that these two lineages not only share substantial primary sequence similarity, but also share tertiary structure.

[0440] The western blot and ELISA results confirm the expression of functional Influenza B HA1-1 and HA1-2 fusion proteins in E. coli.

### Example 4

### Purification and Biochemical Characterization of Recombinant Flagellin-Hemagglutinin Fusion Proteins

### Materials and Methods

[0441] Bacterial growth and cell lysis: HA constructs were expressed in the E. coli host strain BLR (DE3). E. coli cells carrying a plasmed encoding STF2.HA1-1.his(PR8) (SEQ ID NO: 54) were cultured and harvested as described above. Individual strains were retrieved from glycerol stocks and grown in shake flasks to a final volume of 12 L. Cells were grown in LB medium containing 50 μg/ml kanamycin/12.5 μg/ml tetracycline/0.5% dextrose to OD₆₀₀=0.6 and induced with 1 mM IPTG for 3 h at 37° C. The cells were harvested by centrifugation (7000 rpm×7 minutes in a Sorvall RC5C centrifuge) and resuspended in 1×PBS, 1% glycerol, 1 μg/ml DNAseI, 1 mM PMSF, protease inhibitor cocktail and 1 mg/ml lysozyme. The cells were then lysed by two passes through a microfluidizer at 15,000 psi. The lysate was centrifuged at 45,000 g for one hour in a Beckman Optima L ultracentrifuge (Beckman Coulter; Fullerton, Calif.) to separate the soluble and insoluble fractions

[0442] Purification and refolding of STF2.HA1-1.his(PR8) (SEQ ID NO: 89) protein from E. coli. Following lysis and centrifugation, the insoluble (pellet) fraction was resuspended in 100 ml 1×TBS, pH 8.0+1 mM β-mercaptoethanol and solid urea was added to a final concentration of 6.2 M. After resuspension with a Dounce glass-ball homogenizer the mixture was centrifuged as described above. The resulting supernatant was loaded onto a chelating sepharose column (GE/Amersham Biosciences; Piscataway, N.J.) charged with NiSO₄ and equilibrated in Buffer A [20 mM Tris, pH 8.0/8 M urea/0.5 M NaCl].

[0443] After washing with 1 L buffer B [Buffer A+1% (w/v) TX-100] the column was eluted in a 5-column volume linear gradient from 100% Buffer A to 100% Buffer C [Buffer A+0.5 M imidazole]. Peak fractions were pooled, concentrated 3.5 fold on an Amicon 15 spin concentrator (Millipore; Billerica, Mass.) and dialyzed against 3×2 L of 8 M urea/20 mM Tris, pH 8.0/2 mM EDTA. Following dialysis, STF2.HA1-1.his(PR8) (SEQ ID NO: 89) was refolded by rapid dilution to a final concentration of 0.1 mg/ml protein in Refolding Buffer [0.1 M Tris, pH 8.0/0.1 M NaCl/1% (w/v) glycerol/5 mM reduced glutathione/1 mM oxidized glutathione] and incubated overnight at room temperature.

[0444] The refolded protein was then captured on a 5 ml chelating sepharose HiTrap column (GE/Amersham Biosciences; Piscataway, N.J.) charged with NiSO₄ and equilibrated in Buffer D [20 mM Tris, pH 8.0/0.5 M NaCl/1 mM reduced glutathione/0.2 mM oxidized glutathione] and eluted in 100% Buffer E [Buffer D+0.5 M imidazole]. Peak eluate fractions were pooled, concentrated using an Amicon 15 spin concentrator (Millipore; Billerica, Mass.) and fractionated on a Superdex 200 size-exclusion column (GE/Amersham; Piscataway, N.J.) equilibrated in 1×TBS, pH 8.0+0.5% (w/v) Na deoxycholate. S200 peak fractions were pooled, dialyzed against 3×2 L of 1×TBS, pH 8.0 (without deoxycholate), vialed and stored at −80° C.

[0445] Purification of STF2.HA1-2(PR8) (SEQ ID NO: 90) and STF2.HA1-2mut(PR8) (SEQ ID NO: 91): E. coli cells carrying a plasmid encoding STF2.HA1-2.his (PR8) (SEQ ID NO: 55) were cultured and harvested as described above. Following lysis and centrifugation, the insoluble (pellet) fraction containing STF2.HA1-2(PR8) was resuspended and homogenized in 50 mM Tris, pH 8.0+0.5% (w/v) Triton X-100 using a Dounce homogenizer. The homogenate was then centrifuged (19,000 rpm×10 min). The resulting pellet fraction was then re-homogenized in 50 mM Tris, pH 8.0+0.5% (w/v) Triton X-100+1.0 M NaCl and centrifuged. The inclusion body fraction (pellet) was then dissolved in buffer A [50 mM Na Acetate, pH 4.0+8.0 M urea] and centrifuged (19,000 rpm×10 min.) to remove insoluble debris.

[0446] The resulting supernatant was fractionated on a Source S column (GE/Amersham Biosciences; Piscataway, N.J.) equilibrated in Buffer A and eluted in a 5 column-volume linear gradient with Buffer B (50 mM Na Acetate, pH 4.0, 1.0 M NaCl). The protein was then refolded by rapid dilution into Buffer C (100 mM Tris-HCl, pH 8.0). The refolded protein was then fractionated on a Q sepharose HP column (GE/Amersham Biosciences; Piscataway, N.J.) equilibrated in Buffer C and eluted in a 0% to 60% linear gradient with buffer D (Buffer C+1 M NaCl). The Q HP eluate was then fractionated on a Superdex 200 size exclusion chromatography (SEC) column (GE/Amersham Biosciences; Piscataway, N.J.) equilibrated with 1× Tris-buffered saline, pH 8.0, to separate monomeric from aggregated protein. Monomeric fractions were then pooled, aliquoted and stored at −80° C.

[0447] Purification of STF2.HA1-3(PR8) (SEQ ID NO: 92): E. coli cells carrying a plasmed encoding STF2.HA1-3 (PR8) (SEQ ID NO: 57) were cultured and harvested as described above. Following lysis and centrifugation the soluble (supernatant) fraction containing STF2.HA1-3(PR8) was adjusted to 6.2 M urea, 100 mM DTT and incubated at room temperature overnight to completely reduce and denature the protein. The protein was then diluted five-fold in Buffer A (50 mM citric acid, pH 3.5, 8 M urea, 1 mM β-mercaptoethanol, 1 mM EDTA) and loaded onto an SP sepharose FF column (GE/Amersham Biosciences; Piscataway, N.J.) equilibrated with Buffer A. To remove endotoxin, the column washed with 10 column volumes of Buffer B (Buffer A+1% (w/v) Triton X-100) followed by 10 column volumes Buffer C (50 mM citric acid, pH 3.5, 1 mM β-mercaptoethanol, 1 mM EDTA, 70% (v/v) isopropanol).

[0448] The bound protein was then eluted in a five column-volume linear gradient of Buffer A:Buffer D (Buffer A+1M NaCl). The eluted protein was then dialyzed to Buffer E (20 mM Tris, pH 8.5, 8 M urea, 1 mM β-mercaptoethanol, 1 mM EDTA) and passed through a Source Q column (GE/Amersham Biosciences; Piscataway, N.J.). The STF2.HA1-3(PR8) (SEQ ID NO: 92) protein was collected in the flow-thru fraction. The protein was concentrated using Amicon spin-concentrators (Millipore; Billerica, Mass.) and dialyzed to Buffer F (20 mM Tris, pH 8.0, 8 M urea, 1 mM EDTA) to remove reductant. The denatured polypeptide was then refolded by rapid dilution to a final concentration of 0.1 mg/ml in Refolding Buffer (0.1 M Tris, pH 8.0, 0.1 M NaCl, 1% (w/v) glycerol, 5 mM reduced glutathione, 1 mM oxidized glutathione) and incubated overnight at room temperature. The refolded protein was then fractionated on a Superdex 200 size exclusion column equilibrated in 1× Tris-buffered saline (TBS), pH 8.0, plus 0.25% (w/v) sodium deoxycholate to separate monomeric STF2.HA1-3(PR8) from aggregated protein. Monomeric peak fractions were pooled, dialyzed to 1×TBS, pH 8.0, to remove deoxycholate, aliquoted and stored at −80° C.

[0449] Purification of HA1-2His(PR8) (SEQ ID NO: 93): E. coli cells carrying a plasmed encoding STF2.HA1-2.his (PR8) (SEQ ID NO: 61) were cultured and harvested as described above. Following cell lysis the insoluble fraction was homogenized and washed once with Buffer A (50 mM Tris, pH 8.0), followed by sequential washing with Buffer A+0.5% (w/v) Triton X-100 and Buffer A+0.5% (w/v) Triton X-100+1M NaCl. The insoluble material was then washed twice more with Buffer A alone. The washed inclusion bodies were then dissolved in Buffer B (1×PBS, pH 7.4, 8 M urea) and applied to a Ni-NTA (Sigma-Aldrich; St. Louis, Mo.) column charged with NiSO₄ and eluted in a linear gradient of Buffer C (50 mM Tris, pH 8.0, 8 M urea, 0.3 M NaCl, 0.5 M imidazole). In order to reduce endotoxin, the eluted protein was dialyzed overnight against 1×PBS, pH 7.4, 8 M urea, and reapplied to the Ni-NTA column.

[0450] The column was then washed with Buffer D (10 mM Tris, pH 8.8, 8 M urea, 60% (v/v) isopropanol) and eluted as described above. Ni-NTA purified protein was then refolded by 1:10 (v/v) dilution into Refolding Buffer (50 mM Tris, pH 8.8). The refolded HA1-2 His(PR8) (SEQ ID NO: 93) protein was then concentrated using an Amicon ultrafiltration unit (Millipore; Billerica, Mass.) and applied to a Superdex 200 size exclusion column (GE/Amersham; Piscataway, N.J.) equilibrated in 1×TBS, pH 8.0. Monomeric peak fractions were pooled, aliqoted and stored at −80° C.

[0451] SDS-PAGE and western blot analysis: Protein identity of all HA constructs was determined, and purity estimated, by SDS-PAGE. An aliquot of 5 μg of each sample was diluted in SDS-PAGE sample buffer with or without 100 mM DTT as a reductant. The samples were boiled for 5 minutes and loaded onto a 10% SDS polyacrylamide gel (LifeGels; French's Forrest, New South Wales, AUS) and electrophoresed. The gel was stained with Coomassie R-250 (Bio-Rad; Hercules, Calif.) to visualize protein bands. For western blot, 0.5 μg/lane total protein was electrophoresed as described above and the gels were then electro-transfered to a PVDF membrane and blocked with 5% (w/v) dry milk before probing with anti-flagellin antibody (Inotek; Beverly, Mass.) or influenza A PR/8/34 Convalescent immune serum (described below under Protein Antigenicity ELISA). After probing with alkaline phosophatase-conjugated secondary antibodies (Pierce; Rockland, Ill.), protein bands were visualized with an alkaline phosphatase chromogenic substrate (Promega; Madison, Wis.).

[0452] Protein assay: Total protein concentration for all proteins was determined using the Micro BCA (bicinchoninic acid) Assay (Pierce; Rockford Ill.) in the microplate format, using bovine serum albumin as a standard, according to the manufacturer's instructions.

[0453] Endotoxin assay: Endotoxin levels for all proteins were determined using the QCL-1000 Quantitative Chromogenic LAL test kit (Cambrex; E. Rutherford, N.J.), following the manufacturer's instructions for the microplate method.

[0454] TLR5 bioactivity assay: HEK293 cells constitutively express TLR5, and secrete several soluble factors, including IL-8, in response to TLR5 signaling. Cells were seeded in 96-well microplates (50,000 cells/well), and the following test proteins were added and incubated overnight: STF2.HA1-1His(PR8) (SEQ ID NO: 89); STF2.HA1-2(PR8) (SEQ ID NO: 90); STF2.HA1-2(PR8)mut (SEQ ID NO: 91); STF2.HA1-3(PR8) SEQ ID NO: 92); HA1-2His(PR8) (SEQ ID NO: 93); STF2.HA1-2 (Mal) (SEQ ID NO: 211) supernatant; STF2. HA1-2 (Mal) (SEQ ID NO: 211) refolded; STF2.HA1-2 (SH) (SEQ ID NO: 211) supernatant; STF2.HA1-2 (SH) (SEQ ID NO: 211) refolded; STF2.HA1-1 (Mal) (SEQ ID NO: 209) supernatant; and STF2.HA1-1 (Mal) (SEQ ID NO: 209). The next day, the conditioned medium was harvested, transferred to a clean 96-well microplate, and frozen at −20° C. After thawing, the conditioned medium was assayed for the presence of IL-8 in a sandwich ELISA using an anti-human IL-8 matched antibody pair (Pierce, Rockland, Ill.; #M801E and #M802B) following the manufacturer's instructions. Optical density was measured using a microplate spectrophotometer (FARCyte, GE/Amersham; Piscataway, N.J.).

[0455] Protein antigenicity ELISA: To determine whether the recombinant fusion proteins displayed correctly folded epitopes of HA, the antigenicity of individual HA-fusion proteins was evaluated by ELISA. 96-well ELISA plates were coated overnight at 4° C. with serial dilutions in PBS (100 μl/well) of each target protein starting at 5 μg/ml. Plates were blocked with 200 μl/well of Assay Diluent Buffer (ADB; BD Pharmingen) for one hour at room temperature, then washed three times in PBS-T. A fixed dose of primary antibody was then added to each well.

[0456] To assay HA reactivity, 100 μl/well of a 1:10,000 dilution of non-immune or PR/8/34 convalescent immune serum in ADB was added. PR/8/34 immune serum was generated in BALB/c mice (Jackson Laboratory, Bar Harbor, Me.) that received an experimentally determined sublethal challenge dose of 8×10¹ egg infectious dosages (EID) of PR/8/34 influenza virus. Animals were then allowed to convalesce for >21 days post-infection at which time immune serum was isolated and clarified. For ELISA of flagellin or the 6× histidine tag, monoclonal antibody against 6×His (Invitrogen; Carlsbad, Calif.), or flagellin (Inotek; Beverly, Mass.) was added at 1 μg/ml in ADB (100 μl/well) and the plates were incubated for 1 hr at room temperature or overnight at 4° C. The plates were then washed three times with PBS-T. HRP-labeled goat anti-mouse IgG antibodies (Jackson Immunochemical; West Grove, Pa.) diluted in ADB were added (100 μl/well) and the plates were incubated at room temperature for 1 hour. The plates were washed three times with PBS-T. After adding TMB Ultra substrate (Pierce; Rockford, Ill.) and monitoring color development, A₄₅₀ was measured on a microplate spectrophotometer (FARCyte, GE/Amersham; Piscataway, N.J.).

### Results and Discussion

[0457] Protein yield and purity: Results for the purification of recombinant HA and STF2.HA fusion proteins produced in E. coli are shown in Table 6. All four proteins were produced in high yield, with estimated purity exceeding 90% and endotoxin well below the standard acceptable level of 0.1 EU/μg. The three STF2 fusion proteins also had very high in vitro TLR5 bioactivity while the HA1-2His₆ (SEQ ID NO: 93) protein, as expected, had no TLR5 activity.

TABLE 6

| | | | | | TLR5 |
|---|---|---|---|---|---|
| | | | purity | | activity |
| | SEQ | yield | est. | endotoxin | (EC₅₀, |
| protein | ID NO: | (mg) | (%) | (EU/μg) | ng/ml) |
| STF2.HA1-1His(PR8) | 89 | 6.4 | >90 | 0.04 | 0.2 |
| STF2.HA1-2(PR8) | 90 | 6.0 | >98 | 0.02 | 0.15 |
| STF2.HA1-2(PR8)mut | 91 | 12 | >95 | 0.01 | 1.2 |
| STF2.HA1-3(PR8) | 92 | 2.1 | >90 | 0.016 | 1.2 |
| HA1-2His(PR8) | 93 | 10 | >95 | 0.03 | nd |

[0458] Antigenicity of Influenza A HA proteins produced in E. coli.: All four recombinant proteins were analyzed by western blotting with antibody against STF2 (flagellin) (Inotek; Beverly, Mass.) and immune antisera collected from PR8/34 convalescent mice. The three STF2 fusion proteins appeared to react comparably with anti-flagellin antibody. STF2.HA1-1His(PR8) (SEQ ID NO: 89), STF2.HA1-2(PR8) (SEQ ID NO: 90) and HA1-2His(PR8) (SEQ ID NO: 93) also reacted with anti-PR/8/34 convalescent serum. This reactivity was only seen in non-reduced protein samples; the addition of DTT to the sample buffer greatly diminished the signal. This finding suggests that the majority of the anti-HA antibodies in the convalescent serum are conformationally dependent and that proper disulfide bonding in HA is necessary for reactivity by western blot. In contrast to these results, STF2.HA1-3(PR8) (SEQ ID NO: 92) did not react efficiently with the convalescent serum and what little signal was produced was not affected by reductant. This finding suggested that the STF2.HA1-3 protein may not be capable of folding properly and/or presenting native HA epitopes.

Capture ELISA for Influenza B Globular Head Proteins

[0459] The antigenicity of individual HA-fusion proteins was evaluated using capture ELISA. An anti-flagellin monoclonal antibody was used on the solid phase to capture these proteins. Ferret anti-sera raised on natural B/Malaysia/2506/2004 infection was used to detect the captured HA-fusion proteins. The results of this assay will determine whether the recombinant fusion proteins displayed correctly-folded epitopes of HA. Due to the considerable sequence homology between the different Influenza B HA globular head molecules, 84.6%, these antisera would be expected to react with both the Malaysian and the Shanghai globular head constructs.

Preparation of Samples

[0460] E. coli cells expressing the STF2.HA1-2(Malaysia (SEQ ID NO: 210)), STF2.HA1-2 (Shanghai (SEQ ID NO: 211)), and STF2.HA1-1 (Malaysia (SEQ ID NO: 209)) recombinant proteins were pelleted by centrifugation and resuspended in Tris buffer (50 mM Tris, 200 mM NaCl, pH 8). Cells were lysed by sonication. The cell lysate was centrifuged to separate the soluble proteins from the insoluble proteins. The insoluble protein pellet was resuspended in Tris buffer with 6M urea and the proteins were subjected to rapid refolding by quickly diluting the solution 1:10 fold in Tris buffer. The protein concentrations of both the soluble proteins and the pelleted samples containing refolded proteins were estimated by UV₂₈₀ (Spectrophotometer DU 800). Supernatants containing STF2.HA1-1(Mal) (SEQ ID NO: 209); STF2.HA1-2(Mal) (SEQ ID NO: 210), STF2.HA1-2(SH, Shanghai) (SEQ ID NO: 211) protein and solubilized pellets containing refolded STF2.HA1-1(Mal), STF2.HA1-2(Mal), STF2.HA1-2(SH) were evaluated by ELISA for reactivity with ferret antisera raised on natural infection against B/Malaysia/2506/2004. E. coli supernatant samples and solubilized, refolded samples containing STF2.4×M2e (SEQ ID NO: 94) protein were used as negative controls.

ELISA Method

[0461] The ELISA plate (Maxisorp, Nunc, Denmark) was coated with the flagellin-specific monoclonal antibody 6H11 (Inotek, Beverly, Mass.) at 0.5 ug/mL and incubated overnight at 2-5° C. The antibody coating solution was aspirated and the wells were blocked with 300 uL/well Super Block+Tween-20 for 2 hours at 25° C. The plate was washed once with 1×PBS and blot-dried. Three-fold serial dilutions of the different protein solutions were performed in a dilution plate starting with a concentration of 5 ug/mL. 100 uL was transferred from the dilution plate to the ELISA plate.

[0462] The plate was incubated for 1 hr at 25° C. Unbound protein was removed by washing the plate 3 times with PBS+0.05% Tween-20. Ferret antiserum raised against B/Malaysia/2506/2004 (CDC, AL, Georgia) was diluted to 1:100 and 100 uL was added to each well. The plate was then incubated for 1 hr at 25° C. After this incubation step, the plates were washed 6 times with PBS containing 0.05% Tween-20. Goat anti-ferret IgG conjugated to horseradish peroxidase (HRP, Bethyl Labs Inc., IL) was diluted 1:10,000 and 100 uL was added to each well. The plate was incubated for 30 min. After this incubation step, the plate washed 6 times with PBS+0.05% Tween-20. 100 uL of TMB Ultra containing the HRP substrate 3,3′,5,5′-tetramethylbenzidine (Pierce, Rockford, Ill.) was added to each well. After the addition of this substrate, the color development was monitored and the reaction was stopped with the addition of 100 uL/well 1M H₂SO₄. A₄₅₀ was measured on a microplate reader (SpectraMax 190, Molecular devices, Sunnyvale, Calif.).

Antigenicity of Influenza B HA Proteins Produced in E. coli

[0463] The ELISA data (FIG. 3) indicated that the antisera recognized epitopes that were sensitive to reductant. Treatment of proteins with reducing agents, which alter the conformation of the proteins by the disruption of disulphide bonds and, diminished reactivity of the antisera with the proteins. The reactivity of STF2.HA1-2(Mal) total lysate non-reduced, STF2.HA1-2(SH) total lysate non-reduced and STF2.HA1-1(Mal) total lysate non-reduced when maintained in the properly folded configuration was very good and indicates that the conformation of the individual HA-fusion proteins was comparable to that of the globular head in the native HA protein. While the antiserum contains conformationally sensitive antibodies and the reactivity depends on correct disulfide bonding, it also contains antibodies that are non-sensitive to disulfide bonding as demonstrated by the residual activity which was observed in both reduced and non-reduced conditions.

TLR5 Bioactivity of STF2.HA (Influenza B) Proteins

[0464] The recombinant fusion proteins showed potency which matched the results from the Capture ELISA indicating that refolded samples may be more active than the lysate in its native form (FIGS. 4 and 5). The samples in the native untreated form showed activity which were 2-fold less than the refolded samples. These proteins were misfolded in the native form and therefore require a refolding step to reinstall the TLR-5 bioactivity. This activity was consistent with HA activity in the Capture ELISA.

### Example 5

### Immunogenicity of Recombinant Flagellin-Hemagglutinin Fusion Proteins Representing Viral Strain A/Puerto Rico/8/34 in E. coli

### Materials and Methods

[0465] Animal studies: Female BALB/c mice (Jackson Laboratory, Bar Harbor, Me.)) were used at the age of 6-8 weeks. Mice were divided into groups of 10 and received inguinal subcutaneous (s.c) immunizations on days 0 and 14 as follows:

1) PBS (phosphate buffered saline).

2) 3 μg of STF2.4×M2e (SEQ ID NO: 94) in saline buffer (10 mM Histidine, 10 mM Tris, 75 mM NaCl, 5% (vol/vol) sucrose, 0.02% (w/v) Polysorbate-80, 0.1 mM EDTA, 0.5% (v/v) ethanol, pH 7.2)

3) 30 μg of STF2.HA1-2(PR8) (SEQ ID NO: 90) in PBS

4) 3.0 μg of STF2.HA1-2(PR8) (SEQ ID NO: 90) in PBS

5) 0.3 μg of STF2.HA1-2(PR8) (SEQ ID NO: 90) in PBS

6) 0.03 μg of STF2.HA1-2(PR8) (SEQ ID NO: 90) in PBS

[0466] An additional group of five mice received an experimentally determined sublethal challenge with 8×10¹ egg infectious dosages (EID) PR/8/34 and were allowed to convalesce for >21 days. These animals were then used as immune convalescent positive controls during the challenge studies (see below). Mice were bled on days 10 (primary) and 21 (boost), and sera were clarified by clotting and centrifugation and stored at −20° C.

[0467] Serum antibody determination: HA-specific IgG levels were determined by ELISA. 96-well ELISA plates (Costar (Cat #9018) Corning, N.Y.) were coated overnight at 4° C. with 100 μl/well HA0sHis protein (produced in Drosophila) (SEQ ID NO: 176) in PBS (5 μg/ml). Plates were blocked with 200 μl/well of Assay Diluent Buffer (ADB; BD Pharmingen, (Cat#: 555213)(San Diego, Calif.) for one hour at room temperature. The plates were washed three times in PBS+0.05% (v/v) Tween 20 (PBS-T). Dilutions of the sera in ADB were added (100 μl/well) and the plates were incubated overnight at 4° C. The plates were washed three times with PBS-T. HRP-labeled goat anti-mouse IgG antibodies (Jackson Immunochemical, West Grove, Pa. (Cat#: 115-035-146)) diluted in ADB were added (100 μl/well) and the plates were incubated at room temperature for 1 hour. The plates were washed three times with PBS-T. After adding TMB Ultra substrate (Pierce (Cat 34028), Rockford, Ill.)) and monitoring color development, A₄₅₀ was measured on a Tecan Farcyte (Durham, N.C.) microplate spectrophotometer.

[0468] MDCK whole cell ELISA: MDCK cells (ATCC (Cat# CCL-34) Manassas, Va.) were grown in 96-well culture plates (BD (Cat 353075), Corning, N.Y.) in DMEM complete medium containing 10% FCS at 37° C. for one to two days or until cells were near confluence. Wells were then incubated with 1×10⁶ EID of PR/8/34 virus (50 μl) in DMEM medium without FCS or medium alone (for uninfected controls).

[0469] Following a 60 minute incubation at 37° C., 200 μl of complete medium was added to each well and plates were incubated overnight at 37° C. The next day plates were washed with PBS and fixed with 10% formalin at room temperature for 10 minutes. Wells were washed three times with PBS/0.1% BSA and blocked with 200 μl/well ADB (BD Pharmingen, Cat# 555213), San Diego, Calif.) for one hour at RT or overnight at 4° C. Serial dilutions of test sera were added to the wells and incubated for one to two hours at room temperature. Wells were washed and incubated with HRP-conjugated goat anti-mouse IgG (Jackson Immunochemical, Cat 115-035-146 (West Grove, Pa.) for 30 minutes at room temperature, followed by TMB Ultra substrate (Pierce (Cat# 34028), Rockford, Ill.) for two minutes at room temperature. The reaction was stopped with the addition of 25 μl of 1N H₂SO₄ and the OD₄₅₀ was read using a microplate spectrophotometer (FARCyte, Amersham, Durham, N.C.).

Results and Discussion

[0470] Induction of HA-specific IgG response following immunization with STF2.HA1-2(PR8) (SEQ ID NO: 90): The immunogenicity of STF2.HA1-2 was examined by immunizing BALB/c mice (10/group) subcutaneously on day 0 and 14 with a dose range of STF2.HA1-2 (30, 3.0, 0.3, or 0.03 μg). Control groups of mice were immunized with PBS (negative control), 3 μg of STF2.4×M2e (SEQ ID NO: 94) (negative control for HA immunogenicity, positive control for lethal challenge efficacy study), or a sub-lethal challenge with 8×10¹ EID of the influenza isolate PR/8/34 to generate immune convalescent animals. HA-specific IgG responses were examined 7 days post boost (Day 21) by ELISA. The results demonstrate that immunization with 30, 3 or 0.3 μg of STF2.HA1-2(PR8) induced consistent and significant HA0sHis-specific (SEQ ID NO: 176) IgG responses in a dose-dependent manner (FIG. 6).

[0471] Sera from BALB/c mice immunized with STF2.HA1-2 (SEQ ID NO: 90) react with MDCK cells infected with influenza virus: The direct ELISA results above demonstrated that the immune sera from STF2.HA1-2-immunized animals recognize recombinant Drosophila expressed HA0sHis (SEQ ID NO: 176) corresponding to the PR/8/34 HA sequence. In order to demonstrate that the anti-HA antibodies recognize native viral HA, the same sera were examined for the ability to react with MDCK cells infected with PR/8/34. The results shown in FIG. 7 demonstrate that sera from mice immunized with 30, 3.0, or 0.30 μg of STF2.HA1-2 bound specifically to PR/8/34-infected MDCK cells, indicating that the anti-HA antibodies elicited by immunization with STF2.HA1-2 recognize HA in its native conformation.

[0472] Collectively these results demonstrate that mice immunized with STF2.HA1-2(PR8) (SEQ ID NO: 90) in PBS, without conventional adjuvant or carrier, mounted vigorous anti-HA responses that recognized recombinant HA expressed in Drosophila and native viral HA expressed on the surface of PR/8/34 infected MDCK cells in vitro.

### Example 6

### Efficacy of Recombinant Flagellin-Hemagglutinin Fusion Proteins Representing Viral Strain A/Puerto Rico/8/34

### Materials and Methods

[0473] Influenza virus challenge of mice. To assess efficacy, mice immunized as described in Example 5 were challenged on day 28 by intranasal administration of an LD₉₀ (dose lethal to 90% of mice) (8×10³ EID) of influenza A isolate PR/8/34. Animals were monitored daily for 21 days following the challenge for survival, weight loss and clinical presentation. The % weight loss was calculated based on the mean of ((Daily weight (g)/Initial weight (g) day 28)×100) of each individual animal per group. Clinical scores were assigned as follows: 4 pts=healthy, 3 pts=reduced grooming, 2 pts=reduced physical activity and 1 pt=moribund. (Experimental results for clinical scores and weight loss reflect the results based on surviving animals on the day evaluated).

[0474] Virus Titration and Determination of TCID₅₀.

[0475] Cell preparation: MDCK cells (ATCC (Cat# CCL-34), Manassas, Va.) were cultured in 100×20 mm culture plates (BD (Cat# 353003) Corning, N.Y.) to 90-95% confluency and the monolayer was dislodged by incubation with trypsin-EDTA at 37° C./5% CO₂ for 20 minutes. The trypsin was inactivated by the addition of DMEM cell culture medium supplemented with 10% FBS, and the cell monolayer was scraped with a sterile spatula to complete detachment of cells. The cell suspension was harvested and washed twice with DMEM+10% FBS. Cells were resuspended in DMEM+10% FBS and counted. The cell concentration was adjusted to 4×10⁵ cells/ml and 100 μl was added to each well of a 96-well tissue culture plate (BD (Cat# 353075), Corning N.Y.). Plates were incubated at 37° C./5% CO₂ until confluence reached 90-95%.

[0476] Viral titration: Influenza virus (strain A/Puerto Rico/8/34 [PR/8]) was diluted to 1×10⁸ EID in phenol red-free DMEM+0.1% BSA (fractionV (Rockland (Cat#BSA-50) Gilbertsville, Pa.), and serial 5-fold dilutions were prepared in 96-well plates using the same medium. Monolayers of MDCK cells in 96-well plates, prepared as described in herein, were washed by aspirating the culture medium, replacing with 200 μl/well of 1×PBS, and aspirating the PBS. Serial 5-fold dilutions of influenza virus prepared above were added to the washed monolayers in a volume of 100 μl/well. One row of wells was treated with medium only as a control. The cells were incubated for 2 hours at 37° C./5% CO₂ to allow viral attachment and entry. Wells were washed by aspiration, rinsing with 200 μl/well PBS, and aspiration of the PBS. All wells received 100 μl/well phenol red-free DMEM+0.1% BSA and the plates are incubated for 48 hours at 37° C./5% CO₂.

[0477] Determination of cell viability: Following incubation with virus as described above, the medium was aspirated from the wells and replaced with fresh medium containing 40 μg/ml neutral red (Simga Aldrich (Cat# N2889) St. Louis, Mo.). To determine maximum lysis, 2 μl lysis solution (9% Triton X-100 in water, weight/vol) was added to triplicate wells that were incubated with medium only. Following a one hour incubation, the cells were fixed by the addition of 100 μl/well 1% formaldehyde/1% CaCl₂ for 5 minutes at room temperature; this fix step was performed twice in succession. The fix solution was aspirated and the neutral red was released by the addition of 100 μl/well of extraction medium (50% ethanol/1% acetic, acid).

[0478] The plate was incubated at room temperature for 20 minutes, with shaking for the final 2 minutes. The amount of dye released was determined by measuring absorbance at a wavelength of 540 nm using a microplate spectrophotometer. Cell death (and hence, viral infectivity) was measured as a decrease in the amount of dye released as compared to media control. At the end of the incubation, the neutral red assay was performed as described herein. The percentage lysis of each serum dilution was calculated as:
% reduction=100×((sample−virus)/(med−virus))

[0479] where sample, max, and med refer to the absorbance values in wells representing experimental samples, virus only, and medium only, respectively. The neutralizing titer of each sample was defined as the dilution of serum which resulted in a 50% reduction in viral infectivity.

[0480] Influenza A/PR/8/34 Neutralization Assay This assay was adapted with modifications from WHO Manual on Animal Influenza Diagnosis and Surveillance, p. 86-88 (WHO/CDS/CSR/NCS2002.5). The Neutral Red Assay is adapted from a public protocol of the Cell Lab at Gettysburg College (http://www3.gettysburg.edu/˜sorense/Cellab04/neutralred.htm)

[0481] Specifically, MDCK (ATCC, Cat#(CCL 34), Manassas, Va.) cells were plated in 96-well tissue culture plates (BD (Cat 353075), Corning, N.Y.) as described above. Test reagents (experimental and control Sera) were heat-inactivated by incubating for 30 minutes in a water bath heated to 56° C. Sera were serially titrated in 96-well plates, in 3-fold dilutions in phenol red-free DMEM+0.1% BSA. An equal volume of PR/8/34 virus diluted to 5×10⁶/ml EID in the same medium was added to each serum dilution to achieve a final viral concentration of 2.5×10⁶ EID/ml (The pre-determined TCID₅₀ for our current stock of virus). Wells containing medium only and virus only were included as negative and positive controls, respectively. The plates were incubated for 30 minutes at 37° C./5% CO₂.

[0482] Cell monolayers prepared as described above (Cell preparation) were washed once with 200 μl/well 1×PBS, then 100 μl/well of serum:virus mixtures and control reagents prepared as described above were added and incubated for 2 hours at 37° C./5% CO₂. Following incubation, cell monolayers were washed once with PBS, and 100 μl/well phenol red-free DMEM+0.1% BSA was added to each well and incubated at 37° C./5% CO₂ for 48 hours. At the end of the incubation, the neutral red assay was performed as described above (Determination of cell viability). The percentage lysis of each serum dilution was calculated as described above. The neutralizing titer of each sample was defined as the dilution of serum which results in a 50% reduction in viral infectivity

### Results and Discussion

[0483] Immunization with STF2.HA1-2(PR8) (SEQ ID NO: 90) provides protection from a lethal challenge with influenza A: The results from Example 5 demonstrated that immunization of mice with STF2.HA1-2(PR8) (SEQ ID NO: 90) generated an antibody response that recognized native HA. In order to evaluate efficacy, the same mice were challenged on day 28 with an LD₉₀ (8×10³ EID) of PR/8/34 virus administered intra-nasally. Mice were monitored daily for 19 days following the challenge for survival, weight loss and clinical presentation. As shown in FIGS. 8A, 8B, and 8C, PBS-immunized mice showed signs of infection (weight loss and lower clinical scores) as early as three days post-challenge and all mice died by day 21 post-challenge. In contrast, mice immunized with 30, 3.0 or 0.3 μg of STF2.HA1-2(PR8) (SEQ ID NO: 90) demonstrated markedly enhanced protection. These animals demonstrated little to no weight loss, significantly higher clinical scores and 100% survival that was similar to immune convalescent control animals over the 21 day period. These results demonstrate that E. coli-expressed STF2.HA1-2(PR8) (SEQ ID NO: 90) induces HA-specific immune responses that successfully protect BALB/c mice from a lethal challenge with virulent influenza A virus in vivo.

[0484] In order to evaluate the effectiveness of the antibody response in vitro a cell-based virus neutralization assay was developed to test the ability of immune sera to neutralize viral infectivity. In this study the viral inhibitory activity of serum from animals immunized with STF2.HA1-2(PR8) (SEQ ID NO: 90) and STF2.HA1-1(PR8) (SEQ ID NO: 151) was examined. Serial dilutions of non-immune and immune sera were pre-incubated with PR/8 and incubated with MDCK cells. Wells were washed to remove free virus and plates were incubated prior to staining with neutral red to detect live cells. The results indicate that immune sera from animals immunized with STF2.HA1-2(PR8) (SEQ ID NO: 90) demonstrated a tissue culture inhibition 50% dose (TCID) of >1:40 (FIG. 9).

### Example 7

### Immunogenicity of Recombinant Flagellin-Hemagglutinin Fusion Proteins Representing Viral Strain A/Viet Nam/1203/2004

### Materials and Methods

[0485] Animal studies: Female BALB/c mice (Jackson Laboratory, Bar Harbor, Me.) were used at the age of 6-8 weeks. Mice were divided into groups of 10 and received inguinal s.c immunizations on days 0 and 14 as follows:

[0486] 1) PBS (phosphate buffered saline).

[0487] 2) 3.0 μg of STF2.HA1-2(PR8) (SEQ ID NO: 90) in PBS

[0488] 3) 3.0 μg of STF2.HA1-2(VN) (SEQ ID NO: 95) in PBS

[0489] 4) 0.3 μg of STF2.HA1-2(VN) (SEQ ID NO: 95) in PBS

[0490] Mice were bled on day 21 and sera were clarified by clotting and centrifugation and stored at −20° C.

[0491] Serum antibody determination: HA and STF2-specific IgG levels were determined by ELISA. 96-well ELISA plates (Costar (Cat#9018), Corning, N.Y.) were coated overnight at 4° C. with 100 μl/well of HA protein purified from Viet Nam/1203/2004 (BEI Resources (Cat #NR-660), Manassas, Va.)) or recombinant flagellin (STF2) (SEQ ID NO: 96) in PBS (5 μg/ml). Plates were blocked with 200 μl/well of Assay Diluent Buffer (ADB; BD Pharmingen (Cat#555213) San Diego, Calif.) for one hour at room temperature. The plates were washed three times in PBS buffer containing 0.05% (v/v) Tween 20 (PBS-T). Dilutions of the sera in ADB were added (100 μl/well) and the plates were incubated overnight at 4° C. The plates were washed three times with PBS-T. HRP-labeled goat anti-mouse IgG antibodies (Jackson Immunochemical (Cat#115-035-146), West Grove, Pa.) diluted in ADB were added (100 μl/well) and the plates were incubated at room temperature for 1 hour. The plates were washed three times with PBS-T. After adding TMB Ultra substrate (Pierce (Cat#34028), Rockford, Ill.)) and monitoring color development, A₄₅₀ was measured on a Tecan Farcyte (Durham, N.C.) microplate spectrophotometer.

### Results and Discussion

[0492] The immunogenicity of STF2.HA1-2(VN) (SEQ ID NO: 95) was examined in BALB/c mice. Animals were immunized s.c. on days 0 and 14 with 3 μg STF2.HA1-2(PR8) (SEQ ID NO: 90), or 3 or 0.3 μg of STF2.HA1-2(VN) (SEQ ID NO: 95). On day 21 animals were bled and serum IgG responses to purified HA from A/Viet Nam/1203/2004 (obtained from BEI Resources Cat# NR-660) and recombinant flagellin (STF2; (SEQ ID NO: 96)) were examined by ELISA (FIGS. 10A and 10B). The results demonstrate that serum from mice immunized with STF2.HA1-2(VN) (SEQ ID NO: 95) exhibit antigen-specific reactivity with purified H5 protein from influenza A/Viet Nam/1203/2004.

### Example 8

### Cloning, Expression, and Biochemical Characterization of Recombinant Flagellin-Hemagglutinin Fusion Proteins Produced in Baculovirus

[0493] Cloning: Expression of HA and STF2.HA fusion proteins was carried out using the Bac-to-Bac Baculovirus Expression System (Invitrogen, Carlsbad, Calif.) according to the manufacturer's guidelines (FIG. 11). cDNAs encoding HA and STF2.HA fusion proteins were cloned into the pFastBac donor plasmid which was then used to transform DH10Bac cells containing the bacmid and helper DNA. Recombinant bacmid clones generated by homologous recombination in DH10Bac were then identified by blue-white screening on X-gal plates. The details of the cloning procedure are given in the following paragraphs.

[0494] Generation of vector cassettes: The pFastBac™1 vector is compatible with the Bac-to-Bac® Baculovirus Expression System (Invitrogen, Carlsbad, Calif.). This vector has a strong AcMNPV polyhedrin (PH) promoter for high level protein expression and a large multiple cloning site for simplified cloning. pFastBac™1 is a non-fusion vector (i.e. no fusion tags are present in the vector).

[0495] To ensure proper expression of recombinant protein, the insert must contain an ATG start codon for initiation of translation and a stop codon for termination of translation. In order to facilitate cloning of flagellin in fusion with several truncations of the HA gene, two plasmid cassettes were engineered: pFB-STF2Blp.wt (SEQ ID NO: 97) and pFB-STF2Blp.ng (SEQ ID NO: 98). In the latter, the putative glycosylation sites in the flagellin (STF2) gene were obliterated by substituting Gln (Q) for Asn (N). Potential glycosylation sites were determined using the consensus sequence for N-glycosylation N-X-S/T: N residue followed by any residue by S or T in the third position.

[0496] In the certain locations, residues 40, 122, 215, 237, 414, 478, and 497 of the STF2 gene (SEQ ID NO: 212) the N residue was incorporated as a Q substitution. Constructs which harbor these mutations and in which the proteins are not likely to be modified by sugars are designated as non-glycosylated (ng) mutants. Similarly, glycosylation mutations were introduced in HA0s gene at positions 11, 23, 268, 286 and 480 (SEQ ID NO: 23). Both vector constructs (pFB-STF2Blp.wt and pFB-STF2Blp.ng) harbor a silent mutation at nucleotides 5′-GTGCTGAGCCTGTTACGT-3′ (SEQ ID NO: 310) (nt 1501 to 1518) of STF2 (SEQ ID NO: 212) creating a unique BlpI in the plasmid cassette. Each cassette contains the honey bee melittin (HBM) sequence (SEQ ID NO: 99) fused at the amino terminus of STF2 to provide a signal for secretion. Both plasmids were codon-optimized for expression in B Baculovirus (Midland Certified Reagent Co., Inc, Midland, Tex.; DNA2.0 Inc, Menlo Park, Calif.). The synthetic genes were excised with BamHI or BglII and SphI and cloned into pFastBac™ 1 vector by compatible end ligation generating the pFB-STF2Blp.wt and pFB-STF2Blp.ng cassettes.

[0497] Flagellin-HA fusion constructs: Subunits of the HA globular head from influenza strains A/Puerto Rico/8/34, A/Viet Nam/1203/2004, A/Indonesia/2005 and A/New Calcdonia/12/99 were expressed alone or genetically fused to flagellin (STF2) (SEQ ID NO: 178) and expressed in Baculovirus. This was accomplished by one of three methods.

[0498] Method #1: To generate reagents for ELISA, HA1-1 subunits of PR8, VN, IND and NC strains (Tables 7 and 8) were cloned into pFASTBac™1, generating pFB.HA1-1 that harbors a hexa-his tag. This was achieved by employing PCR with a set of primers as indicated in the Tables below and with a synthetic codon-optimized HA0s gene (HA excluding the signal sequence and extracellular domain) as DNA template (DNA2.0 Inc., Menlo Park, Calif.). The PCR fragments were digested with BglII and SphI and inserted into pFastBac™1 that has previously been treated with BglII and SphI enzymes followed by BAP treatment. In order to generate a flagellin-HA subunit fusion, the PCR product was digested with BlpI, and ligated by compatible ends to pFB-STF2Blp.wt.

[0499] Method #2: In this protocol, codon-optimized HA subunit genes representing both the wt and non-glycosylated forms were chemically synthesized (DNA2.0 Inc., Menlo Park, Calif.). The genes were excised with BlpI and SphI enzymes and the fragment gel purified and ligated to pFB-STF2Blp.wt or the non-glycosylated version, pFB-STF2Blp.ng previously digested with BlpI and SphI and BAP treated. In each case, the ligation mix was used to transform TOP10 cells and transformants were screened by PCR and DNA sequencing to confirm the presence and correct orientation of the inserts. The constructs were used to transform MAX Efficiency® DH10Bac™ competent E. coli (Invitrogen, Carlsbad, Calif.) to generate a recombinant bacmid. The colonies of bacteria were screened for positive bacmids by blue/white selection on plates containing 50 μg/mL kanamycin, 7 μg/mL gentamycin, 10 μg/mL tetracycline, 40 μg/mL IPTG and Bluo-Gal (40 μg/mL). Recombinant bacmid DNA was prepared and used to transfect the insect cell line of choice (Sf9 or Sf21 cells) to generate a recombinant Baculovirus. The baculoviral stock was then amplified and titered and used to infect High Five insect cells to express the recombinant protein.

TABLE 7
PR8 HA constructs for expression in Baculovirus

| | | | FOR | REV | DNA |
|---|---|---|---|---|---|
| | | | Primer | Primer | Template |
| SEQ | Construct | | SEQ | SEQ | SEQ |
| ID NO: | (His tag) | Method | ID NO: | ID NO: | ID NO: |
| 100 | STF2.HA0s | #1 | 101 | 102 | 103 |
| 104 | STF2.HA1-1 | #1 | 105 | 106 | 103 |
| 107 | STF2.HA1-2 | #1 | 108 | 109 | 103 |
| 110 | STF2.HA1-2mut | #2 | N/A | N/A | 111 |
| 112 | STF2.HA1-3 | #1 | 113 | 114 | 103 |
| 115 | STF2.HA1-3mut | #2 | N/A | N/A | 116 |
| 117 | ngSTF2.HA0s | #2 | N/A | N/A | 118 |
| 119 | ngSTF2.HA1-1 | #2 | N/A | N/A | 120 |
| 121 | ngSTF2.HA1-2 | #2 | N/A | N/A | 122 |
| 123 | ngSTF2.HA1-2mut | #2 | N/A | N/A | 124 |
| 125 | ngSTF2.HA1-3 | #2 | N/A | N/A | 126 |
| 127 | ngSTF2.HA1-3mut | #2 | N/A | N/A | 128 |
| 129 | wtSTF2.HA1-1ng | #2 | N/A | N/A | 130 |
| 131 | ngSTF2.HA1-1wt | #2 | N/A | N/A | 132 |
| 133 | HA1-1 | #1 | 134 | 135 | 136 |
| 137 | HA1-1 (no tag) | #1 | 134 | 138 | 136 |

[0500] TABLE 8
NC, VN and NC HA constructs for expression in Baculovirus

| | | | FOR | REV | DNA |
|---|---|---|---|---|---|
| | | | Primer | Primer | Temlate |
| SEQ | Construct | | SEQ | SEQ | SEQ |
| ID NO: | (his tag) | Method | ID NO: | ID NO: | ID NO: |
| 139 | HA1-1(NC) | #1 | 140 | 141 | 142 |
| 143 | HA1-1(VN) | #1 | 144 | 145 | 146 |
| 147 | HA1-1(IND) | #1 | 148 | 149 | 150 |

[0501] Protein Expression: Spodoptera frugiperda (Sf9) insect cells were cultured in Grace's Insect Cell Medium (Invitrogen; Carlsbad, Calif.). Recombinant bacmids were purified from DH10Bac clones and transfected into Sf9 cells using Cellfectin (Invitrogen; Carlsbad, Calif.) to generate passage one (P1) Baculovirus stocks which were then titered by traditional plaque assay according to the manufacturer's guidelines. Subsequent infections of Sf9 cells were performed using P1 viral stocks at a multiplicity of infection (MOI) of 0.1 to produce larger volume P2 viral stocks with increased viral titers. Cultures expressing the following proteins were scaled up for protein purification: ngSTF2.HA(PR8)1-2mutHis (SEQ ID NO: 156); ngSTF2.HA(PR8)1-1His (SEQ ID NO: 152; STF2.HA(PR8)1-1His (SEQ ID NO: 151); STF2.HA(PR8)1-2His (SEQ ID NO: 153); STF2.HA1-2mutHis (SEQ ID NO: 155); HA(PR8)1-1His (SEQ ID NO: 179) HA(VN)1-1His (SEQ ID NO: 180); HA(IND)1-1His (SEQ ID NO: 181); HA(NC)1-1His (SEQ ID NO: 182). Protein expression was performed by infecting 2×1 L flasks of High-5 insect cells with P2 virus at an MOI of 2 and culturing for 24 hrs at 28° C. with slow shaking. Conditioned medium was harvested by centrifugation and clarified by passing through a 0.22 μm filter and stored at 4° C.

[0502] Protein Purification: NiSO₄ was added to each clarified supernatant to a final concentration of 0.5 mM and the pH adjusted to 8.0. The His₆-tagged protein was then captured on a chelating sepharose column (GE/Amersham Biosciences; Piscataway, N.J.) charged with NiSO₄ and equilibrated in Buffer A (20 mM Tris, pH 8.0, 0.5 M NaCl). After washing with Buffer A the bound protein was eluted with Buffer B (Buffer A+0.5 M imidazole). Peak fractions were pooled, dialyzed overnight into Buffer A and applied to a nickel NTA column (Sigma-Aldrich; St. Louis, Mo.). The column was eluted with a 5-column volume gradient from 100% Buffer A to 100% Buffer B. Peak fractions were pooled and dialyzed into 1×TBS, pH 8.0.

[0503] SDS-PAGE and western blot analysis: Protein identity was determined, and purity estimated, by SDS-PAGE. An aliquot of 5 μg of each sample was diluted in SDS-PAGE sample buffer with or without 100 mM DTT as a reductant. The samples were boiled for 5 minutes and loaded onto a 10% SDS polyacrylamide gel (LifeGels; French's Forrest, New South Wales, AUS) and electrophoresed. The gel was stained with Coomassie R-250 (Bio-Rad; Hercules, Calif.) to visualize protein bands. For western blot, 0.5 μg/lane total protein was electrophoresed as described above and the gels were then electro-transfered to a PVDF membrane and blocked with 5% (w/v) dry milk before probing with anti-flagellin antibody (Inotek; Beverly, Mass.), anti-His₆ antibody (Invitrogen; Carlsbad, Calif.), or influenza A PR/8/34 convalescent immune serum (described below under Protein Antigenicity ELISA). After probing with alkaline phosophatase-conjugated secondary antibodies (Pierce; Rockford, Ill.), protein bands were visualized with an alkaline phosphatase chromogenic substrate (Promega; Madison, Wis.).

[0504] Protein assay: Total protein concentration was determined using the Micro BCA (bicinchoninic acid) Assay (Pierce; Rockford, Ill.) in the microplate format, using bovine serum albumin as a standard, according to the manufacturer's instructions.

[0505] Endotoxin assay: Endotoxin levels were determined using the QCL-1000 Quantitative Chromogenic LAL test kit (Cambrex; E. Rutherford, N.J.), following the manufacturer's instructions for the microplate method.

[0506] TLR5 bioactivity assay: HEK293 cells constitutively express TLR5, and secrete several soluble factors, including IL-8, in response to TLR5 signaling. Cells were seeded in 96-well microplates (50,000 cells/well), and the following test proteins were added and incubated overnight: ngSTF2.HA(PR8)1-2mutHis (SEQ ID NO: 156); ngSTF2.HA(PR8)1-1His (SEQ ID NO: 152); STF2.HA(PR8)1-1His (SEQ ID NO: 151); STF2.HA(PR8)1-2His (SEQ ID NO: 153); STF2.HA1-2(PR8)mutHis (SEQ ID NO: 155) The next day, the conditioned medium was harvested, transferred to a clean 96-well microplate, and frozen at −20° C. After thawing, the conditioned medium was assayed for the presence of IL-8 in a sandwich ELISA using an anti-human IL-8 matched antibody pair (Pierce; Rockford, Ill., #M801E and #M802B) following the manufacturer's instructions.

[0507] Protein antigenicity ELISA: The following constructs purified from Baculovirus culture were evaluated by ELISA to determine whether the proteins displayed correctly folded epitopes of HA: ngSTF2.HA(PR8)1-2mutHis (SEQ ID NO: 156); ngSTF2.HA(PR8)1-1His (SEQ ID NO: 152); STF2.HA(PR8)1-1His (SEQ ID NO: 151); STF2.HA(PR8)1-2His (SEQ ID NO: 153); STF2.HA1-2mutHis (SEQ ID NO: 155); and HA(PR8)1-1His (SEQ ID NO: 179). 96-well ELISA plates were coated overnight at 4° C. with serial dilutions in PBS (100 μl/well) of each target protein starting at 5 μg/ml. Plates were blocked with 200 μl/well of Assay Diluent Buffer (ADB; BD Pharmingen) for one hour at room temperature, then washed three times in PBS-T. A fixed dose of primary antibody was then added to each well. To assay HA reactivity, 100 μl/well of a 1:10,000 dilution of non-immune or PR/8/34 convalescent immune serum in ADB was added. PR/8/34 immune serum was generated in BALB/c mice (Jackson Laboratory, Bar Harbor, Me.) that received an experimentally determined sublethal challenge dose of 8×10¹ egg infectious dosages (EID) of PR/8/34 influenza virus. Animals were then allowed to convalesce for >21 days post-infection at which time immune serum was isolated and clarified.

[0508] For ELISA of flagellin or the 6× histidine tag, monoclonal antibody against 6× His (Invitrogen; Carlsbad, Calif.), or flagellin (Inotek; Beverly, Mass.) was added at 1 μg/ml in ADB (100 μl/well) and the plates were incubated for 1 hr at room temperature or overnight at 4° C. The plates were then washed three times with PBS-T. HRP-labeled goat anti-mouse IgG antibodies (Jackson Immunochemical; West Grove, Pa.) diluted in ADB were added (100 μl/well) and the plates were incubated at room temperature for 1 hour. The plates were washed three times with PBS-T. After adding TMB Ultra substrate (Pierce; Rockford, Ill.) and monitoring color development, A₄₅₀ was measured on a microplate spectrophotometer (FARCyte, GE/Amersham; Piscataway, N.J.).

### Results and Discussion

[0509] Expression and purification of recombinant HA proteins: The results of Baculovirus expression of recombinant STF2.HA fusion proteins are summarized in Table 9. All proteins were expressed in moderate to high yield. Purity after metal chelate chromatography was generally good and endotoxin levels were far below the acceptable limit of 0.1 EU/μg. All STF2 fusion proteins demonstrated potent in vitro TLR5 activity.

TABLE 9

| | | | | | TLR |
|---|---|---|---|---|---|
| | | | Purity | | activity |
| | SEQ | Yield | est. | Endotoxin | (EC₅₀, |
| Protein | ID NO: | (mg) | (%) | (EU/μg) | ng/ml) |
| STF2.HA1-1His(PR8) | 151 | 12 | >80 | 0.01 | 3 |
| ngSTF2.HA1-1His(PR8) | 152 | 24 | >90 | <0.01 | 30 |
| STF2.HA1-2His(PR8) | 153 | 13.2 | >90 | <0.01 | 9 |
| STF2.HA1- | 155 | 25 | >95 | <0.01 | 900 |
| 2mutHis(PR8) | | | | | |
| ngSTF2.HA1- | 156 | 6 | >90 | 0.01 | 9 |
| 2mutHis(PR8) | | | | | |

[0510] STF2.HA proteins for Baculovirus expression were engineered with and without N-linked glycosylation sites in order to determine the effect of this posttranslational modification on protein expression, folding, and biological activity. ngSTF2.HA1-2.mutHis(PR8) (SEQ ID NO: 156), which is non-glycosylated, appears to be expressed at a lower level in Baculovirus supernatants than the corresponding glycosylated protein, suggesting that glycosylation may influence the folding or secretion of this protein. However, the glycosylated and non-glycosylated versions of this protein appear to react equally with convalescent antiserum from influenza PR8-infected mice when analyzed by western blot. Furthermore, ngSTF2.HA1-1His(PR8) (SEQ ID NO: 152) expressed at higher levels than its glycosylated counterpart, indicating that any effect of glycosylation on expression of these proteins may not be easily generalized.

[0511] In addition to the proteins expressed and purified at large scale, small-scale Baculovirus P1 supernatants of STF2.HA1-3His(PR8) (SEQ ID NO: 157) and STF2.HA1-3mutHis(PR8) (SEQ ID NO: 158) were analyzed for HA antibody reactivity. As seen with the STF2.HA1-3(PR8) protein (SEQ ID NO: 92) expressed in E. coli (See Example #4), these proteins showed very poor reactivity with PR8 convalescent mouse serum on western blots of conditioned medium. This result further confirms that STF2.HA1-3 proteins, whether expressed in a prokaryotic or eukaryotic host, are unable to fold properly and display native epitopes.

[0512] Antigenicity: Several STF2.HA proteins produced in Baculovirus and E. coli were analyzed by ELISA. All STF2 fusion proteins reacted equally well with anti-flagellin antibody (Inotek; Beverly, Mass.), demonstrating equal protein loading in the assay. Proper folding and display of antibody epitopes in STF2.HA fusion proteins was then examined by measuring reactivity of each protein with antisera from mice which had recovered from PR/8/34 influenza infection. Reactivity with PR/8/34 convalescent mouse serum was equivalent for Baculovirus-expressed STF2.HA1-1His(PR8) (SEQ ID NO: 151), ngSTF2.HA1-1His(PR8) (SEQ ID NO: 152), and ngSTF2HA1-2mutHis(PR8) (SEQ ID NO: 156), and E. coli-expressed STF2.HA1-2(PR8) (SEQ ID NO: 90) (see Example #4). Thus, serum antibody recognition of the HA head domain may be focused on a region encompassed by the HA1-2 construct. Further, in vitro refolding of STF2.HA1-2 (SEQ ID NO: 90) produced in E. coli results in a protein with equivalent immune reactivity (and therefore similar folded conformation) to a protein processed and secreted from a eukaryotic host (Baculovirus). In addition, serum antibody recognition of the HA head domain may not appear to be dependent on glycosylation and, at least for PR/8/34 HA, may not be negatively affected by glycosylation. HAs (hemaglutinins) from different influenza strains have variable patterns of N-linked glycosylation. (glycosylation may negatively affect immune recognition of other HAs. Serum antibody recognition of HA may be unaffected by N-glycosylation. It is possible glycosylation may otherwise influence the effectiveness, such as the half-life of a vaccine.

### Example 9

### Immunogenicity and Efficacy of Recombinant Flagellin-Hemagglutinin Fusion Proteins Produced in Baculovirus

### Material and Methods

[0513] Animal studies: Female BALB/c mice (Jackson Laboratory, bar Harbor, Me.) were used at the age of 6-8 weeks. Mice were divided into groups of 10 and received inguinal subcutaneous immunizations on days 0 and 14 as follows:

1) PBS (phosphate buffered saline).

2) 3 μg of STF2.HA1-2(PR8) E. coli (SEQ ID NO: 90) in PBS

3) 3 μg of STF2.HA1-1(PR8) Baculovirus (SEQ ID NO: 151) in PBS

4) 3 μg of ngSTF2.HA1-1(PR8) Baculovirus (SEQ ID NO: 152) in PBS

5) 0.3 μg of ngSTF2.HA1-1(PR8) Baculovirus (SEQ ID NO: 152) in PBS

6) 3 μg of STF2.HA1-1(PR8) E. coli (SEQ ID NO: 89) in PBS

7) 0.3 μg of STF2.HA1-1(PR8) E. coli (SEQ ID NO: 89) in PBS

[0514] Mice were bled on days 10 (primary) and 21 (boost), and sera were clarified by clotting and centrifugation and stored at −20° C. Immunized animals were challenged on day 28 with an LD₉₀ (8×10³ EID) of PR/8/34 virus administered intranasally (See Example 6). Mice were monitored daily for 21 days following the challenge for survival, weight loss and clinical presentation.

[0515] Serum antibody determination: HA-specific IgG levels were determined by ELISA. 96-well ELISA plates (Costar (Cat#9018), Corning, N.Y.) were coated overnight at 4° C. with 100 μl/well HA0sHis protein produced in Drosophila (SEQ ID NO 176) in PBS (5 μg/ml). Plates were blocked with 200 μl/well of Assay Diluent Buffer (ADB; BD Pharmingen (Cat# 555213), San Diego, Calif.) for one hour at room temperature. The plates were washed three times in PBS containing 0.05% Tween-20 (PBS-T). Dilutions of the sera in ADB were added (100 μl/well) and the plates were incubated overnight at 4° C. The plates were washed three times with PBS-T. HRP-labeled goat anti-mouse IgG antibodies (Jackson Immunochemical (Cat# 115-035-146)) diluted in ADB were added (100 μl/well) and the plates were incubated at room temperature for 1 hour. The plates were washed three times with PBS-T. After adding TMB Ultra substrate (Pierce (Cat# 34028), Rockford, Pa.) and monitoring color development, A₄₅₀ was measured on a Tecan Farcyte (Durham, N.C.) microplate spectrophotometer.

### Results and Discussion

[0516] Immunogenicity and efficacy of STF2.HA1-1(PR8) expressed in E. coli and Baculovirus: BALB/c mice were immunized s.c. with 3.0 or 0.3 μg of indicated recombinant fusion proteins on days 0 and 14. On day 21 mice were bled and HA-specific IgG titers were examined by ELISA against HA0sHis (SEQ ID NO 176) expressed in Drosophila. FIGS. 12A,12B shows the proteins induced varying levels of HA-specific IgG with ngSTF2.HA1-1(PR8) (SEQ ID NO: 152) inducing the strongest response similar to that observed in animals immunized with STF2.HA1-2(PR8) expressed in E. coli (SEQ ID NO: 90). Interestingly, animals immunized with STF2.HA1-1(PR8) containing the intact glycosylation sequences expressed in Baculovirus (SEQ ID NO: 151) elicited little to no detectable antibody responses to HA or flagellin, in marked contrast to that observed in animals similarly immunized with STF2.HA1-1(PR8) where the consensus glycosylation sequences had been removed (SEQ ID NO: 152).

[0517] The immunized mice were challenged on day 28 with an LD₉₀ (8×10³ EID) of PR/8/34 virus administered intranasally. Mice were monitored daily for 21 days following the challenge for survival, weight loss and clinical presentation. As shown in FIGS. 13A, 13B, 13C, PBS-immunized mice showed signs of infection (weight loss and lower clinical scores) as early as three days after challenge and died by day 21, while mice immunized with 3.0 μg of recombinant STF2.HA1-2(PR8) (SEQ ID NO: 90) fusion protein demonstrated enhanced protection with little to no observable clinical signs of infection or weight loss. Although animals immunized with STF2.HA1-1 fusion proteins demonstrated significantly higher efficacy than animals immunized with PBS alone, these animals demonstrated lower efficacy in terms of survival, clinical scores and overall weight loss, compared to animals receiving STF2.HA1-2(PR8) (SEQ ID NO: 90). These results demonstrate that HA subunits linked to STF2 in Baculovirus are immunogenic and efficacious, and suggest that STF2.HA1-1 (SEQ ID NO: 89) expressed in E. coli or Baculovirus is less immunogenic and efficacious than STF2.HA1-2 expressed in E. coli(SEQ ID NO: 90) or Baculovirus.

### Example 10

### Purification of STF2.HA1-2 (IND) (SEQ ID NO: 159)

### Materials and Methods

[0518] Cell banking: E. coli cells engineered to express STF2.HA1-2(IND) (SEQ ID NO: 159) were adapted to culture in proprietary MRSF media, banked as glycerol stocks in 1 mL aliquots, and stored at −70° C.

MRSF media, pH 7.0

| Composition | g/L |
|---|---|
| Glucose | 10 |
| KH₂PO₄ | 7.8 |
| (NH₄)₂SO4 | 2.33 |
| Citric Acid | 1.0 |
| MgSO₄(7H₂0) | 1.0 |
| CaCl₂ | 0.04 |
| Trace Metals | 1 ml |
| Thiamine HCl | 0.01 |
| Kanamycin | 0.0075 |

[0519] Trace Metal Solution 1000×

| Component | g/L |
|---|---|
| EDTA, disodium | 5 |
| FeSO₄(7H₂O) | 10 |
| ZnSO₄(7H₂O) | 2 |
| MnSO₄(H₂O) | 2 |
| CoCl₂(6H₂O) | 0.2 |
| CuSO₄(5H₂O) | 0.1 |
| Na₂MoO₄(2H₂O) | 0.2 |
| H₃BO₃ | 0.1 |
| H₂O | 1000 ml |

[0520] Cell scale-up: Two vials (2 ml, banked in MRSF media) of E. coli cells engineered to express STF2.HA1-2 (IND) (SEQ ID NO: 159) were retrieved from −70° C. and inoculated into 500 ml of MRSF medium. The cells were expanded by incubation at 37° C. for 11.5 hours, at which time the OD₆₀₀ was 3.2. The cell scale up provided biomass to inoculate the production bioreactor used in the fermentation.

[0521] Fermentation: A 250 mL aliquot of scaled up cells was used to inoculate a 12 L working volume bioreactor containing 10 L of proprietary MRBR media. The culture was incubated with constant stirring while maintaining pH at 7.0±0.1, temperature at 30±0.1° C., and dissolved oxygen (DO) at no less than 30%, and was run in batch mode until the glucose was exhausted. Glucose exhaustion is indicated by a sudden decrease in O₂ demand, and confirmed by measurement of glucose concentration on a YSI 2700 Select glucose meter. The OD₆₀₀ for the culture at this time was 20.1 AU.

[0522] Thirty minutes after glucose exhaustion, proprietary feed media was pumped into the bioreactor at a controlled rate until 2 L of feed was added. The incubation continued for 5.5 hours under glucose-limiting conditions. At an OD₆₀₀ of 34 AU, protein expression in the culture was induced by the addition of IPTG to a final concentration of 2 mM and incubation with constant stirring for 2 hours. At the conclusion of the induction period, cells were harvested by centrifugation in an Avanti JP-20 XP centrifuge for 20 minutes at 10,000 g. The final OD₆₀₀ for the culture was 58 AU and the total protein concentration as determined by BCA was 6.73 mg/mL. 1.16 kg of cell paste was recovered from 10.8 L harvest and frozen at −20° C. The total bioreactor run time was 17 hours. STF2.HA1-2 (IND) (SEQ ID NO: 159) production was confirmed by SDS PAGE.

MRBR Media, pH 7.0

| Composition | g/L |
|---|---|
| Glucose | 20 |
| KH₂PO₄ | 2.2 |
| (NH₄)₂SO₄ | 4.5 |
| Citric Acid | 1.0 |
| MgSO₄(7H₂0) | 1.0 |
| CaCl₂ | 0.04 |
| Trace Metals | 1 ml |
| Thiamine HCl | 0.01 |
| Antifoam | 0.05 |
| Kanamycin | 0.0075 |

[0523] Feed media, pH 6.0 - additions to
MRBR media (2 L final volume)

| Composition | g/L |
|---|---|
| Glucose | 160 |
| KH₂PO₄ | 5.6 |
| DL-Alanine | 50.0 |
| Citric Acid | 3.0 |
| MgSO₄(7H₂0) | 1.0 (added as 78 g/L solution) |
| CaCl₂ | 2.5 (added as 80 g/L solution) |
| Trace Metals | 24 ml |
| FeSO₄ 7H₂O | 0.75 |

[0524] Cell disruption and clarification: The cell paste was thawed and resuspended into a 15% suspension of 50 mM Tris, 25 mM NaCl, pH 8. The slurry was homogenized in an APV 1000 homogenizer three times at 12,000 psi. The lysate was adjusted to pH 4.0 by the addition of acetic acid and centrifuged to separate soluble from insoluble material. STF2.HA1-2 (IND) (SEQ ID NO: 159) along with most other proteins partition to the insoluble fraction. The soluble material was discarded and the insoluble material (pellet) was dissolved in two times the initial lysate volume of 50 mM acetate, 1% TritonX-100, 8 M Urea, pH 4. After mixing in the homogenizer at 0 psi, the sample was centrifuged and the supernatant was collected, filtered, and stored at 4° C. The presence of STF2.HA1-2 (IND) (SEQ ID NO: 159) in the proper phases (precipitate or supernatant) was confirmed by SDS PAGE.

[0525] Cation exchange chromatography (CEX): The clarified material was applied to a 50 ml Poros 50HS column. This step was designed to reduce the endotoxin concentration, reduce the nucleic acid concentration and increase the STF2.HA1-2 (IND) (SEQ ID NO: 159) purity of the eluate as compare to the load. After loading, the column washed with five column volumes of 50 mM acetate, 1% Triton X-100, 8 M Urea, pH 4 followed by 10 column volumes of 50 mM acetate, 8 M Urea, pH 4. The protein was eluted in a 0-100% gradient to 1 M NaCl. The target protein eluted at approximately 300 mM NaCl. The major peak (eluate) was pooled and stored at 4° C. The presence of STF2.HA1-2 (IND) (SEQ ID NO: 159) in the elution was confirmed by SDS PAGE. STF2.HA1-2 (IND) (SEQ ID NO: 159) purification across this step was determined by comparing the number and intensity of protein bands in the load material to those in the elution.

[0526] Endotoxin removal in cation exchange chromatography (CEX): Endotoxin is removed from eluting STF2.HA1-2 (IND) (SEQ ID NO: 159) with the 50 mM acetate, 1% Triton X-100, 8 M Urea, pH 4 wash and with proper elution conditions. This was tested using STF2.HA1-2 (VN) (SEQ ID NO: 95) Comparing two separate cation exchange runs (Toso SP650M resin) with and without the 50 mM acetate, 1% Triton X-100, 8 M Urea, pH 4 wash (ER wash vs. no ER wash), the endotoxin concentration in the ER wash elution at 150 mM NaCl shows significantly less endotoxin concentration that the 250 mm NaCl elution from the same run, or in either of the elutions without the 50 mM acetate, 1% Triton X-100, 8 M Urea, pH 4 wash.

| | Elution | | | | |
|---|---|---|---|---|---|
| | (mM | [Endotoxin] | [Endotoxin] | [protein] by | UV |
| Run | NaCl) | (EU/mL) | (EU/mg) | BCA (g/L) | 280/260 |
| Load | N/A | 4.4 × 10⁶ | 1.8 × 10⁶ | 2.39 | — |
| No | 100 | 7.9 × 10⁶ | 4.2 × 10⁶ | 1.44 | 1.05 |
| ER | 250 | 8.0 × 10⁶ | 4.1 × 10⁶ | 1.12 | 2.76 |
| wash | | | | | |
| ER | 150 | 5,112 | 2,888 | 1.77 | 0.982 |
| Wash | 250 | 24,440 | N/A | N/A | 0.545 |

[0527] Refolding: The CEX eluate was dialyzed against 50 mM Tris, 8 M Urea, pH 8 buffer, and refolded by rapid dilution into 10 volumes of 50 mM Tris, pH 8.

[0528] Anion Exchange Chromatography (AEX): The refolded protein was applied to a 25 ml GE Source Q column. This step is designed to separate properly folded STF2.HA1-2 (IND) (SEQ ID NO: 159) from aggregates and host cell proteins and to reduce the endotoxin concentration of the eluate as compared to the load. After loading, the column washed with five column volumes of 50 mM Tris, 25 mM NaCl, pH 8. The protein was eluted in a 0-100% gradient to 1 M NaCl. A peak enriched for properly folded STF2.HA1-2(IND) (SEQ ID NO: 159) with low endotoxin (1.7 EU/mL) eluted at approximately 150 mM NaCl. A second peak eluting at approximately 170 to 270 mM NaCl contains other proteins including STF2.HA1-2 (IND) (SEQ ID NO: 159) aggregates. Fractions in first peak were pooled at stored at 4° C. Fractions from the first peak were kept for further processing. The presence of STF2.HA1-2 (IND) (SEQ ID NO: 159) in the first and second elutions was confirmed by SDS PAGE. STF2.HA1-2 (IND) (SEQ ID NO: 159) purification across this step was determined by comparing the number and intensity of protein bands in the load material to those in the elution.

[0529] Preparative size exclusion chromatography (SEC): The AEX eluate was run on a 320 ml SEC column in 2×5 mL fractions against TBS. This step is designed to separate correctly folded STF2.HA1-2 (IND) (SEQ ID NO: 159) from other proteins. Each run resulted in elution of a single major peak which was collected, pooled, and filtered through a 0.22 μm filter. The product was stored at −70° C.

[0530] The presence of STF2.HA1-2 (IND) (SEQ ID NO: 159) in the elution was confirmed by SDS PAGE. STF2.HA1-2 (IND) (SEQ ID NO: 159) purification across this step was determined by comparing the number and intensity of protein bands in the load material to those in the elution. The final material profile on SDS PAGE is a strong single band.

### Results and Discussion

[0531] Final characterization of protein: Recombinant STF2.HA1-2(IND) (SEQ ID NO: 159) protein was expressed in E. coli and purified to homogeneity. The final product was formulated in 1×TBS (27.7 mM Tris, 2.7 mM KCl, 137 mM NaCl, pH 7.4; made from 10× stock, Teknova catalog #T9530) and stored at −70° C. in aliquots of 1.0 ml. The final yield was 15.75 ml (45 ml at a concentration of 0.35 mg/ml), with an endotoxin level of 1.1 EU/mg protein as determined by the LAL method. The protein retained TLR5 biological activity as measured in a cell-based assay of cytokine release

[0532] SDS-PAGE: Protein identity was determined, and purity estimated, by SDS-PAGE. An aliquot sample was diluted in SDS-PAGE sample buffer and diluent. The samples were boiled for 5 minutes and loaded onto a 4 to 12% SDS polyacrylamide gel (Invitrogen NuPage) and electrophoresed. The gel was stained with Coomassie R-250 to visualize protein bands. Positive results for STF2.HA1-2 (IND) (SEQ ID NO: 159) were indicated by a band at about 75 kDa as compared to BioRad precision plus standards run on the same gel. Purity is estimated by visually comparing the intensity of the STF2.HA1-2 (IND) (SEQ ID NO: 159) band to all other bands.

[0533] TLR5 bioactivity assay: HEK293 cells constitutively express TLR5, and secrete several soluble factors, including IL-8, in response to TLR5 signaling. Cells were seeded in 96-well microplates (50,000 cells/well), and test proteins were added and incubated overnight. The next day, the conditioned medium was harvested, transferred to a clean 96-well microplate, and frozen at −20° C. After thawing, the conditioned medium was assayed for the presence of IL-8 in a sandwich ELISA using an anti-human IL-8 matched antibody pair (Pierce, #M801E and #M802B) following the manufacturer's instructions. Optical density was measured using a microplate spectrophotometer (FARCyte, Amersham).

[0534] Endotoxin assay: Endotoxin levels were determined using the QCL-1000 Quantitative Chromogenic LAL test kit (Cambrex), following the manufacturer's instructions for the microplate method.

[0535] Protein assay: Total protein concentration was determined using the Micro BCA (bicinchoninic acid) Assay (Pierce) in the microplate format, using bovine serum albumin as a standard, according to the manufacturer's instructions.

[0536] UV280/260 assay: This assay is a measure of the nucleic acid concentration in a sample as compared to the protein concentration. The absorbance maximum occurs at approximately 260 nm for nucleic acids, while the absorbance maximum occurs for proteins at approximately 280 nm. A higher ratio between the absorbance at 280 nm versus the absorbance at 260 nm indicates a sample enriched in protein over nucleic acids.

### Example 11

### Cloning, Expression, and Biochemical Characterization of Recombinant Flagellin-Hemagglutinin Fusion Proteins Produced in Drosophila

### Materials and Methods

[0537] Cloning and expression of HA in Drosophila: RNA was isolated from the influenza A strain A/Puerto Rico/8/34 using QIAamp MinElute Virus Spin Kit (Qiagen, Cat#57704) following the manufacturer's instructions. The HA RNA was reverse transcribed using SuperScript III First Strand Synthesis System for RT-PCR (Invitrogen; Cat #18080-051) or SuperScript III One-Step RT-PCR System with Platinum-Taq High Fidelity (Invitrogen; Cat# 12574-030) following the manufacturer's instructions, and the cDNA was cloned using the TOPO cloning vector PCRII Zero Blunt (Invitrogen). The HA0s fragment (HA gene without the signal sequence and trans-membrane domain) was then sub-cloned into pMT/STF2Δ at both the C-terminus and NH2 terminus of the cassette using PCR-based strategy to generate the constructs STF2Δ.HA0s (PR8) (SEQ ID NO: 160) and HA0s(PR8).STF2Δ (SEQ ID NO: 167) respectively. The HA gene was also cloned into the pMT/Bip/V5-his vector without STF2Δ to generate the construct HA0s.his (SEQ ID NO: 170). Table 10 list the constructs and the primers used in their construction.

TABLE 10
PR8 HA constructs for expression in Drosophila

| | | | | DNA |
|---|---|---|---|---|
| SEQ | | FOR Primer | REV Primer | Template |
| ID NO: | Construct | SEQ ID NO: | SEQ ID NO: | SEQ ID NO: |
| 160 | STF2Δ.HA0sHis | 161 | 162 | 163 |
| 164 | STF2Δ.HA0s | 165 | 166 | 163 |
| 167 | HA0s.STF2Δ | 168 | 169 | 163 |
| 170 | HA0sHis | 171 | 172 | 163 |
| 173 | HA0s | 174 | 175 | 163 |

[0538] Recombinant protein expression from Drosophila Dmel-2 cells: The HA0s.His (SEQ ID NO: 170) and STF2Δ.HA0s (SEQ ID NO: 164) plasmids were co-transfected with the pCoBlast plasmid into Drosophila Dmel-2 cells to generate Dmel-2 HA0sHis(PR8) and Dmel-2 STF2Δ.HA0s(PR8) stable cells. Dmel-2 stable cells were expanded from adherent to shaker cultures in selection media [Drosophila Sfm medium (Invitrogen; Carlsbad, Calif.)+25 μg/ml blasticidin] and then expanded to a 12 L production scale.

[0539] Recombinant protein expression was induced by the addition of CuSO₄ to a final concentration of 0.5 mM. After incubation for 72 hours cells were removed from the conditioned medium by centrifugation. The conditioned medium was then clarified by passing through a 0.22 μm filter and stored at 4° C.

[0540] Purification of HA0sHis(PR8) (SEQ ID NO: 176): Conditioned medium was applied to a Chelating Sepharose column (GE/Amersham Biosciences; Piscataway, N.J.) charged with NiSO₄ and equilibrated in Buffer A [20 mM Tris, pH 8.0, 0.5 M NaCl] and eluted in a linear gradient with Buffer B [Buffer A+0.5 M imidazole]. The protein was further purified by fractionation on a Superdex 200 SEC column (GE/Amersham Biosciences; Piscataway, N.J.) equilibrated in 1× Tris-buffered saline (TBS), pH 8.0. HA0s.His₆(PR8) fractions were pooled, aliquoted and stored at −80° C.

[0541] SDS-PAGE and western blot analysis: Protein identity was determined, and purity estimated, by SDS-PAGE. An aliquot of 5 μg of each sample was diluted in SDS-PAGE sample buffer with or without 100 mM DTT as a reductant. The samples were boiled for 5 minutes and loaded onto a 10% SDS polyacrylamide gel (LifeGels; French's Forrest, New South Wales, AUS) and electrophoresed. The gel was stained with Coomassie R-250 (Bio-Rad; Hercules, Calif.) to visualize protein bands. For western blot, 0.5 μg/lane total protein was electrophoresed as described above and the gels were then electro-transfered to a PVDF membrane and blocked with 5% (w/v) dry milk before probing with anti-flagellin antibody (Inotek; Beverly, Mass.), anti-His₆.antibody (Invitrogen; Carlsbad, Calif.) or influenza A PR/8/34 convalescent immune serum (described below under Protein Antigenicity ELISA). After probing with alkaline phosophatase-conjugated secondary antibodies (Pierce; Rockford, Ill.), protein bands were visualized with an alkaline phosphatase chromogenic substrate (Promega; Madison, Wis.).

[0542] Protein assay: Total protein concentration was determined using the Micro BCA (bicinchoninic acid) Assay (Pierce; Rockford, Ill.) in the microplate format, using bovine serum albumin as a standard, according to the manufacturer's instructions.

[0543] Endotoxin assay: Endotoxin levels were determined using the QCL-1000 Quantitative Chromogenic LAL test kit (Cambrex; E. Rutherford, N.J.), following the manufacturer's instructions for the microplate method.

[0544] TLR5 bioactivity assay: HEK293 cells constitutively express TLR5, and secrete several soluble factors, including IL-8, in response to TLR5 signaling. Cells were seeded in 96-well microplates (50,000 cells/well), and recombinant drosophila conditioned medium containing either HA0sHis(PR8) (SEQ ID NO: 176) or STF2Δ.HA0s(PR8) (SEQ ID NO: 177) was added. The next day, the conditioned medium was harvested, transferred to a clean 96-well microplate, and frozen at −20° C. After thawing, the conditioned medium was assayed for the presence of IL-8 in a sandwich ELISA using an anti-human IL-8 matched antibody pair (Pierce; Rockford, Ill., #M801E and #M802B) following the manufacturer's instructions. Optical density was measured using a microplate spectrophotometer (FARCyte, GE/Amersham; Piscataway, N.J.).

[0545] Protein antigenicity ELISA: Purified HA0s.His₆(PR8) (SEQ ID NO: 176) was tested by ELISA to determine if the recombinant protein displayed correctly folded epitopes of HA. 96-well ELISA plates were coated overnight at 4° C. with serial dilutions in PBS (100 μl/well) of HA0s.His₆(PR8) (SEQ ID NO: 176) protein starting at 5 μg/ml. Plates were blocked with 200 μl/well of Assay Diluent Buffer (ADB; BD Pharmingen) for one hour at room temperature, then washed three times in PBS-T. A fixed dose of primary antibody was then added to each well. To assay HA reactivity, 100 μl/well of a 1:10,000 dilution of non-immune or PR/8/34 convalescent immune serum in ADB was added. PR/8/34 immune serum was generated in BALB/c mice (Jackson Laboratory, Bar Harbor, Me.) that received an experimentally determined sublethal challenge dose of 8×10¹ egg infectious dosages (EID) of PR/8/34 influenza virus.

[0546] Animals were then allowed to convalesce for >21 days post-infection at which time immune serum was isolated and clarified. For ELISA of the 6× histidine tag, monoclonal antibody against 6×His (Invitrogen; Carlsbad, Calif.), or flagellin (Inotek; Beverly, Mass.) was added at 1 μg/ml in ADB (100 μl/well) and the plates were incubated for 1 hr at room temperature or overnight at 4° C. The plates were then washed three times with PBS-T. HRP-labeled goat anti-mouse IgG antibodies (Jackson Immunochemical; West Grove, Pa.) diluted in ADB were added (100 μl/well) and the plates were incubated at room temperature for 1 hour. The plates were washed three times with PBS-T. After adding TMB Ultra substrate (Pierce; Rockford, Ill.) and monitoring color development, A₄₅₀ was measured on a microplate spectrophotometer (FARCyte, GE/Amersham; Piscataway, N.J.).

### Results and Discussion

[0547] Characterization of Drosophila-expressed HA0s proteins: Western blot analysis of conditioned media with anti-His₆ antibody (Invitrogen; Carlsbad, Calif.) confirmed expression of HA0sHis(PR8) (SEQ ID NO: 176) and western blot with anti-flagellin antibody (Inotek; Beverly, Mass.) confirmed expression of STF2Δ.HA0s(PR8) (SEQ ID NO: 177) by Drosophila Dmel-2 cells transfected with the corresponding expression plasmid. Both proteins were recognized by western blot in non-reduced form with mouse PR/8/34 convalescent immune serum while reduction of the proteins with DTT abrogated recognition. This result indicates correct disulfide bonding of the two secreted proteins. The STF2Δ.HA0s(PR8) (SEQ ID NO: 177) conditioned medium showed significant in vitro TLR5 activity while the HA0sHis₆(PR8) (SEQ ID NO: 176) medium did not, as expected. Finally, purified HA0sHis₆(PR8) (SEQ ID NO: 176) protein showed significant reactivity with influenza A PR8/34 convalescent immune serum by ELISA. These results indicate that both HA0s proteins are secreted from Drosophila Dmel-2 cells in a properly folded form.

### Example 12

### Immunogenicity and Efficacy of Recombinant Flagellin-Hemagglutinin Fusion Proteins Representing Viral Strain A/Viet Nam/1203/04

### Materials and Methods

[0548] Animal studies: Female BALB/c mice were used at the age of 6-8 weeks. Mice were divided into groups of 15 and received subcutaneous (s.c) immunizations on days 0 and 14 as follows:
[0549] TBS (phosphate buffered saline)
[0550] No immunization
[0551] 10 μg of STF2.HA1-2(VN) (SEQ ID NO: 95) in TBS
[0552] 3.0 μg of STF2.HA1-2(VN) (SEQ ID NO: 95) in PBS
[0553] 1 μg of STF2.HA1-2(VN) (SEQ ID NO: 95) in TBS

[0554] Mice were bled on day 21 and sera were clarified by clotting and centrifugation and stored at −20° C.

[0555] Serum antibody determination: HA-specific IgG levels were determined by ELISA. 96-well ELISA plates (Costar (Cat #9018) Corning, N.Y.) were coated overnight at 4° C. with 100 μl/well recombinant HA protein from A/Vietnam/1203/04, produced in Baculovirus, (BEIR catalog number NR-660) in PBS (1 μg/ml). Plates were blocked with 300 μl/well of Assay Diluent Buffer (ADB; BD Pharmingen, (Cat#: 555213) (San Diego, Calif.) for two hours at 25° C. The plates were washed three times in PBS+0.05% (v/v) Tween 20 (PBS-T). Dilutions of the sera in ADB were added (100 μl/well) and the plates were incubated for 1.5 hours at 25° C. The plates were washed three times with PBS-T. HRP-labeled goat anti-mouse IgG antibodies (Jackson Immunochemical, West Grove, Pa. (Cat#: 115-035-146)) diluted in ADB were added (100 μl/well) and the plates were incubated at 25° C. for 30 minutes. The plates were washed three times with PBS-T. After adding TMB Ultra substrate (Pierce (Cat 34028), Rockford, Ill.)) and monitoring color development, A₄₅₀ was measured on a SpectraMax 190 (Molecular Devices, Sunnyvale, Calif.) microplate spectrophotometer.

[0556] Influenza virus challenge of mice: To assess efficacy, mice were challenged on day 28 by intranasal administration of 10 LD₉₀ (10×dose lethal to 90% of mice) (6×10³ EID) of influenza A/Viet Nam/1203/04. Animals were monitored daily for 21 days following the challenge for survival and clinical presentation.

[0557] Preparation of Influenza H5N1 Stocks: Influenza A/Vietnam/1203/04 (H5N1) was obtained from the Centers for Disease Control and Prevention (Atlanta, Ga.). Stocks of the virus were prepared in 10-day-old embryonated chicken eggs, and aliquots of 0.5 ml were stored at −80° C. until use.

[0558] Determination of Viral Titers: TCID₅₀ (50% tissue culture infectious dose) was determined utilizing MDCK cells seeded into the wells of 96-well plate and grown to confluency. A series of log₁₀ dilutions of the virus was inoculated onto the plate in quadruplicates. The plate was then incubated for 48-72 hours. The TCID₅₀ was determined by identifying the dilution at which quadruplicate wells were ½ positive and ½ negative for viral growth. The EID₅₀ was determined by inoculating log₁₀ dilutions of the stock into 2-4 eggs per dilution. Eggs were incubated for 40-48 hours, and 1 ml of the allantoic fluid was harvested from each egg. ED₅₀ was calculated as the dilution at which ½ of the eggs were negative and ½ of the eggs were positive for infectious virus.

### Results and Discussion

[0559] Induction of HA-specific IgG response following immunization with STF2.HA1-2(VN) (SEQ ID NO: 95): The immunogenicity of STF2.HA1-2(VN) (SEQ ID NO: 95) was examined by immunizing BALB/c mice (15/group) subcutaneously on day 0 and 14 with a dose range of 10, 3, and 1 μg protein. Negative control groups of mice were immunized with TBS or not immunized. HA-specific IgG responses were examined 7 days post boost (Day 21) by ELISA. The results demonstrate that immunization with 10, 3 or 1 μg of STF2.HA1-2(VN) (SEQ ID NO: 95) induced consistent and significant HA-specific IgG responses in a dose-dependent manner (FIGS. 14-16).

[0560] Immunization with STF2.HA1-2(VN) (SEQ ID NO: 95) provides protection from a lethal challenge with influenza A: The serological analysis described above demonstrated that immunization of mice with STF2.HA1-2(VN) (SEQ ID NO: 95) generated an antibody response that recognized native HA. In order to evaluate efficacy, the same mice were challenged on day 28 with 10 LD₉₀ (6×10³ EID) of A/Viet Nam/1203/04 virus administered intra-nasally. Mice were monitored daily for 21 days following the challenge for survival and clinical presentation. As shown in FIG. 17, TBS-immunized or naïve mice showed signs of infection (weight loss and lower clinical scores) as early as five days post-challenge and all mice died by day nine post-challenge. For the mice immunized with STF2.HA1-2(VN), there is a clear relationship between the dose received and efficacy. Mice immunized with 10 μg of STF2.HA1-2(VN) (SEQ ID NO: 95) demonstrated markedly enhanced protection. Mice immunized with 3 or 1 μg of STF2.HA1-2(VN) (SEQ ID NO: 95) demonstrated a modest to a negligible impact on efficacy, respectively. Clinical parameters were similarly related to dose and animals receiving the highest dose of STF2.HA1-2(VN) (SEQ ID NO: 95) exhibited the mildest signs of disease. These results demonstrate that E. coli-expressed STF2.HA1-2(VN) (SEQ ID NO: 95) induces HA-specific immune responses that successfully protect BALB/c mice from a lethal challenge with virulent influenza A virus in vivo.

SEQ ID NO:1 A/Puerto Rico/8/34 HA
MKANLLVLLSALAAADADTICIGYHANNSTDTVDTVLEKNVTVTHSVNLL
EDSHNGKLCRLKGIAPLQLGKCNIAGWLLGNPECDPLLPVRSWSYIVETP
NSENGICYPGDFIDYEELREQLSSVSSFERFEIFPKESSWPHNHTNGVTA
ACSHEGKSSFYRNLLWLTEKEGSYPKLKNSYVNKKGKEVLVLWGIHHPPN
SKEQQNLYQNENAYVSVVTSNYNRRFTPEIAERPKVRDQAGRMNYYWTLL
KPGDTIIFEANGNLIAPMYAFALSRGFGSGIITSNASMHECNTKCQTPLG
AINSSLPYQNIHPVTIGECPKYVRSAKLRMVTGLRNIPSIQSRGLFGAIA
GFIEGGWTGMTDGWYGYHHQNEQGSGYAADQKSTQNAINGITNKVNTVIE
KMNIQFTAVGKEFNKLEKRMENLNKKVDDGFLDIWTYNAELLVLLENERT
LDFHDSNVKNLYEKVKSQLKNNAKEIGNGCFEFYHKCDNECMESVRNGTY
DYPKYSEESKLNREKVDGVKLESMGIYQILAIYSTVASSLVLLVSLGAIS
FWMCSNGSLQCRICI
SEQ ID NO:2 A/Viet Nam/1203/2004 HA
MEKIVLLFAIVSLVKSDQICIGYHANNSTEQVDTIMEKNVTVTHAQDILE
KKHNGKLCDLDGVKPLILRDCSVAGWLLGNPMCDEFINVPEWSYIVEKAN
PVNDLCYPGDFNDYEELKHLLSRINHFEKIQIIPKSSWSSHEASLGVSSA
CPYQGKSSFFRNVVWLIKKNSTYPTIKRSYNNTNQEDLLVLWGIHHPNDA
AEQTKLYQNPTTYISVGTSTLNQRLVPRIATRSKVNGQSGRMEFFWTILK
PNDAINFESNGNFIAPEYAYKIVKKGDSTIMKSELEYGNCNTKCQTPMGA
INSSMPFHNIHPLTIGECPKYVKSNRLVLATGLRNSPQRERRRKKRGLFG
AIAGFIEGGWQGMVDGWYGYHHSNEQGSGYAADKESTQKAIDGVTNKVNS
IIDKMNTQFEAVGREFNNLERRIENLNKKMEDGFLDVWTYNAELLVLMEN
ERTLDFHDSNVKNLYDKVRLQLRDNAKELGNGCFEFYHKCDNECMESVRN
GTDYPQYSEEARLKREEISGVKLESIGIYQILSIYSTVASSLALAIMVAG
LSLWMCSNGSLQCR
SEQ ID NO:3 A/Indonesia/5/2005 HA
MEKIVLLLAIVSLVKSDQICIGYHANNSTEQVDTIMEKNVTVTHAQDILE
KTHNGKLCDLDGVKPLILRDCSVAGWLLGNPMCDEFINVPEWSYIVEKAN
PTNDLCYPGSFNDYEELKHLLSRINHFEKIQIIPKSSWSDHEASSGVSSA
CPYLGSPSFFRNVVWLIKKNSTYPTIKKSYNNTNQEDLLVLWGIHHPNDA
AEQTRLYQNPTTYISIGTSTLNQRLVPKIATRSKVNGQSGRMEFFWTILK
PNDAINFESNGNFIAPEYAYKIVKKGDSAIMKSELEYGNCNTKCQTPMGA
INSSMPFHNIHPLTIGECPKYVKSNRLVLATGLRNSPQRESRRKKRGLFG
AIAGFIEGGWQGMVDGWYGYHHSNEQGSGYAADKESTQKAIDGVTNKVNS
IIDKMNTQFEAVGREFNNLERRIENLNKKMEDGFLDVWTYNAELLVLMEN
ERTLDFHDSNVKNLYDKVRLQLRDNAKELGNGCFEFYHKCDNECMESIRN
GTYNYPQYSEEARLKREEISGVKLESIGTYQILSIYSTVASSLALAIMMA
GLSLWMCSNGSLQCRICI
SEQ ID NO:4 A/NewCaledonia/20/1999
MKAKLLVLLCTFTATYADTICIGYHANNSTDTVDTVLEKNVTVTHSVNLL
EDSHNGKLCLLKGIAPLQLGNCSVAGWILGNPECELLISKESWSYIVETP
NPENGTCYPGYFADYEELREQLSSVSSFERFEIFPKESSWPNHTVTGVSA
SCSHNGKSSFYRNLLWLTGKNGLYPNLSKSYVNNKEKEVLVLWGVHHPPN
IGNQRALYHTENAYVSVVSSHYSRRFTPEIAKRPKVRDQEGRINYYWTLL
EPGDTIIFEANGNLIAPWYAFALSRGFGSGIITSNAPMDECDAKCQTPQG
AINSSLPFQNVHPVTIGECPKYVRSAKLRMVTGLRNIPSIQSRGLFGAIA
GFIEGGWTGMVDGWYGYHHQNEQGSGYAADQKSTQNAINGITNKVNSVIE
KMNTQFTAVGKEFNKLERRMENLNKKVDDGFLDIWTYNAELLVLLENERT
LDFHDSNVKNLYEKVKSQLKNNAKEIGNGCFEFYHKCNNECMESVKNGTY
DYPKYSEESKLNREKIDGVKLESMGVYQILAIYSTVASSLVLLVSLGAIS
FWMCSNGSLQCRICI
SEQ ID NO:5 A/South Carolina/1/18 HA
MEARLLVLLCAFAATNADTICIGYHANNSTDTVDTVLEKNVTVTHSVNLL
EDSHNGKLCKLKGIAPLQLGKCNIAGWLLGNPECDLLLTASSWSYIVETS
NSENGTCYPGDFIDYEELREQLSSVSSFEKFEIFPKTSSWPNHETTKGVT
AACSYAGASSFYRNLLWLTKKGSSYPKLSKSYVNNKGKEVLVLWGVHHPP
TGTDQQSLYQNADAYVSVGSSKYNRRFTPEIAARPKVRDQAGRMNYYWTL
LEPGDTITFEATGNLIAPWYAFALNRGSGSGIITSDAPVHDCNTKCQTPH
GAINSSLPFQNIHPVTIGECPKYVRSTKLRMATGLRNIPSIQSRGLFGAI
AGFIEGGWTGMIDGWYGYHHQNEQGSGYAADQKSTQNAIDGITNKVNSVI
EKMNTQFTAVGKEFNNLERRIENLNKKVDDGFLDIWTYNAELLVLLENER
TLDFHDSNVRNLYEKVKSQLKNNAKEIGNGCFEFYHKCDDACMESVRNGT
YDYPKYSEESKLNREEIDGVKLESMGVYQILAIYSTVASSLVLLVSLGAI
SFWMCSNGSLQCRICI
SEQ ID NO:6 A/Wisconsin/67/2005 HA
QKLPGNDNSTATLCLGHHAVPNGTIVKTITNDQIEVTNATELVQSSSTGG
ICDSPHQILDGENCTLIDALLGDPQCDGFQNKKWDLFVERSKAYSNCYPY
DVPDYASLRSLVASSGTLEFNDESFNWTGVTQNGTSSACKRRSNNSFFSR
LNWLTHLKFKYPALNVTMPNNEKFDKLYIWGVHHPGTDNDQIFLHAQASG
RITVSTKRSQQTVIPNIGSRPRIRNIPSRISIYWTIVKPGDILLINSTGN
LIAPRGYFKIRSGKSSIMRSDAPIGKCNSECITPNGSIPNDKPFQNVNRI
TYGACPRYVKQNTLKLATGMRNVPEKQTR
SEQ ID NO:7 A/X31 subtype H3N2 HA
QDLPGNDNSTATLCLGHHAVPNGTLVKTITDDQIEVTNATELVQSSSTGK
ICNNPHRILDGIDCTLIDALLGDPHCDVFQNETWDLFVERSKAFSNCYPY
DVPDYASLRSLVASSGTLEFITEGFTWTGVIQNGGSNACKRGPGSGFFSR
LNWLTKSGSTYPVLNVTMPNNDNFDKLYIWGIHHPSTNQEQTSLYVQASG
RVTVSTRRSQQTIIPNIGSRPWVRGLSSRISIYWTIVKPGDVLVINSNGN
LIAPRGYFKMRTGKSSIMRSDAPIDTCISECITPNGSIPNDKPFQNVNKI
TYGACPKYVKQNTLKLATGMRNVPEKQT
SEQ ID NO:8 PR/8 HA1-1
SHNGKLCRLKGIAPLQLGKCNIAGWLLGNPECDPLLPVRSWSYIVETPNS
ENGICYPGDFIDYEELREQLSSVSSFERFEIFPKESSWPNHNTNGVTAAC
SHEGKSSFYRNLLWLTEKEGSYPKLKNSYVNKKGKEVLVLWGIHHPPNSK
EQQNLYQNENAYVSVVTSNYNRRFTPEIAERPKVRDQAGRMNYYWTLLKP
GDTIIFEANGNLIAPMYAFALSRGFGSGIITSNASMHECNTKCQTPLGAI
NSSLPYQNIHPVTIGECPKYVR
SEQ ID NO:9 PR/8 HA1-2
KGIAPLQLGKCNIAGWLLGNPECDPLLPVRSWSYIVETPNSENGICYPGD
FIDYEELREQLSSVSSFERFEIFPKESSWPNHNTNGVTAACSHEGKSSFY
RNLLWLTEKEGSYPKLKNSYVNKKGKEVLVLWGIHHPPNSKEQQNLYQNE
NAYVSVVTSNYNRRFTPEIAERPKVRDQAGRMNYYWTLLKPGDTIIFEAN
GNLIAPMYAFALSRGFGSGIITS
SEQ ID NO:10 PR/8 HA1-3
NSENGICYPGDFIDYEELREQLSSVSSFERFEIFPKESSWPNHNTNGVTA
ACSHEGKSSFYRNLLWLTEKEGSYPKLKNSYVNKKGKEVLVLWGIHHPPN
SKEQQNLYQNENAYVSVVTSNYNRRFTPEIAERPKVRDQAGRMNYYWTLL
KPGDTIIFEANGNLIAPMYAFALSRG
SEQ ID NO:11 VN HA1-1
EKKHNGKLCDLDGVKPLILRDCSVAGWLLGNPMCDEFINVPEWSYIVEKA
NPVNDLCYPGDFNDYEELKHLLSRINHFEKIQIIPKSSWSSHEASLGVSS
ACPYQGKSSFFRNVVWLIKKNSTYPTIKRSYNNTNQEDLLVLWGIHHPND
AAEQTKLYQNPTTYISVGTSTLNQRLVPRIATRSKVNGQSGRMEFFWTIL
KPNDAINFESNGNFIAPEYAYKIVKKGDSTIMKSELEYGNCNTKCQTPMG
AINSSMPFHNIHPLTIGECPKYVK
SEQ ID NO:12 VN HA1-2
GVKPLILRDCSVAGWLLGNPMCDEFINVPEWSYIVEKANPVNDLCYPGDF
NDYEELKHLLSRINHFEKIQIIPKSSWSSHEASLGVSSACPYQGKSSFFR
NVVWLIKKNSTYPTIKRSYNNTNQEDLLVLWGIHHPNDAAEQTKLYQNPT
TYISVGTSTLNQRLVPRIATRSKVNGQSGRMEFFWTILKPNDAINFESNG
NFIAPEYAYKIVKKGDSTIMKSE
SEQ ID NO:13 VN HA1-3
NDLCYPGDFNDYEELKHLLSRINHFEKIQIIPKSSWSSHEASLGVSSACP
YQGKSSFFRNVVWLIKKNSTYPTIKRSYNNTNQEDLLVLWGIHHPNDAAE
QTKLYQNPTTYISVGTSTLNQRLVPRIATRSKVNGQSGRMEFFWTILKPN
DAINFESNGNFIAPEYAYKIVKKG
SEQ ID NO:14 IND HA1-1
EKTHNGKLCDLDGVKPLILRDCSVAGWLLGNPMCDEFINVPEWSYIVEKA
NPTNDLCYPGSFNDYEELKHLLSRINHFEKIQIIPKSSWSDHEASSGVSS
ACPYLGSPSFFRNVVWLIKKNSTYPTIKKSYNNTNQEDLLVLWGIHHPND
AAEQTRLYQNPTTYISIGTSTLNQRLVPKIATRSKVNGQSGRMEFFWTIL
KPNDAINFESNGNFIAPEYAYKIVKKGDSAIMKSELEYGNCNTKCQTPMG
AINSSMPFHNIHPLTIGECPKYVK
SEQ ID NO:15 IND HA1-2
GVKPLILRDCSVAGWLLGNPMCDEFINVPEWSYIVEKANPTNDLCYPGSF
NDYEELKHLLSRINHPEKIQIIPKSSWSDHEASSGVSSACPYLGSPSFFR
NVVWLIKKNSTYPTIKKSYNNTNQEDLLVLWGIHHPNDAAEQTRLYQNPT
TYISIGTSTLNQRLVPKIATRSKVNGQSGRMEFFWTILKPNDAINFESNG
NFIAPEYAYKIVKKGDSAIMKSE
SEQ ID NO:16 IND HA1-3
NDLCYPGSFNDYEELKHLLSRINHFEKIQIIPKSSWSDHEASSGVSSACP
YLGSPSFFRNVVWLIKKNSTYPTIKKSYNNTNQEDLLVLWGIHHPNDAAE
QTRLYQNPTTYISIGTSTLNQRLVPKIATRSKVNGQSGRMEFFWTILKPN
DAINFESNGNFIAPEYAYKIVKKG
SEQ ID NO:17 NC HA1-1
SHNGKLCLLKGIAPLQLGNCSVAGWILGNPECELLISKESWSYIVETPNP
ENGTCYPGYFADYEELREQLSSVSSFERFEIFPKESSWPNHTVTGVSASC
SHNGKSSFYRNLLWLTGKNGLYPNLSKSYVNNKEKEVLVLWGVHHPPNIG
NQRALYHTENAYVSVVSSHYSRRFTPEIAKRPKVRDQEGRINYYWTLLEP
GDTIIFEANGNLIAPWYAFALSRGFGSGIITSNAPMDECDAKCQTPQGAI
NSSLPFQNVHPVTIGECPKYVR
SEQ ID NO:18 NC HA1-2
KGIAPLQLGNCSVAGWILGNPECELLISKESWSYIVETPNPENGTCYPGY
FADYEELREQLSSVSSFERFEIFPKESSWPNHTVTGVSASCSHNGKSSFY
RNLLWLTGKNGLYPNLSKSYVNNKEKEVLVLWGVHHPPNIGNQRALYHTE
NAYVSVVSSHYSRRFTPEIAKRPKVRDQEGRINYYWTLLEPGDTIIFEAN
GNLIAPWYAFALSRGFGSGIITS
SEQ ID NO:19 NC HA1-3
NPENGTCYPGYFADYEELREQLSSVSSFERFEIFPKESSWPNHTVTGVSA
SCSHNGKSSFYRNLLWLTGKNGLYPNLSKSYVNNKEKEVLVLWGVHHPPN
IGNQRALYHTENAYVSVVSSHYSRRFTPEIAKRPKVRDQEGRINYYWTLL
EPGDTIIFEANGNLIAPWYAFALSRG
SEQ ID NO:20 WIS HA1-1
QSSSTGGICDSPHQILDGENCTLIDALLGDPQCDGFQNKKWDLFVERSKA
YSNCYPYDVPDYASLRSLVASSGTLEFNDESFNWTGVTQNGTSSACKRRS
NNSFFSRLNWLTHLKFKYPALNVTMPNNEKFDKLYIWGVHHPGTDNDQIF
LHAQASGRITVSTKRSQQTVIPNIGSRPRIRNIPSRISIYWTIVKPGDIL
LINSTGNLIAPRGYFKIRSGKSSIMRSDAPIGKCNSECITPNGSIPNDKP
FQNVNRITYGACPRYVK
SEQ ID NO:21 WIS HA1-2
SPHQILDGENCTLIDALLGDPQCDGFQNKKWDLFVERSKAYSNCYPYDVP
DYASLRSLVASSGTLEFNDESFNWTGVTQNGTSSACKRRSNNSFFSRLNW
LTHLKFKYPALNVTMPNNEKFDKLYIWGVHHPGTDNDQIFLHAQASGRIT
VSTKRSQQTVIPNIGSRPRIRNIPSRISIYWTIVKPGDILLINSTGNLIA
PRGYFKIRSGKSSIMRSD
SEQ ID NO:22 WIS HA1-3
SNCYPYDVPDYASLRSLVASSGTLEFNDESFNWTGVTQNGTSSACKRRSN
NSFFSRLNWLTHLKFKYPALNVTMPNNEKFDKLYIWGVHHPGTDNDQIFL
HAQASGRITVSTKRSQQTVIPNIGSRPRIRNIPSRISIYWTIVKPGDILL
INSTGNLIAPRGYFKIRSG
SEQ ID NO:23 A/Puerto Rico/8/34 HA0s
DTICIGYHANNSTDTVDTVLEKNVTVTHSVNLLEDSHNGKLCRLKGIAPL
QLGKCNIAGWLLGNPECDPLLPVRSWSYIVETPNSENGICYPGDFIDYEE
LREQLSSVSSFERFEIFPKESSWPNHNTNGVTAACSHEGKSSFYRNLLWL
TEKEGSYPKLKNSYVNKKGKEVLVLWGIHHPPNSKEQQNLYQNENAYVSV
VTSNYNRRFTPEIAERPKVRDQAGRMNYYWTLLKPGDTIIFEANGNLIAP
MYAFALSRGFGSGIITSNASMHECNTKCQTPLGAINSSLPYQNIHPVTIG
ECPKYVRSAKLRMVTGLRNIPSIQSRGLFGAIAGFIEGGWTGMIDGWYGY
HHQNEQGSGYAADQKSTQNAINGITNKVNTVIEKMNIQFTAVGKEFNKLE
KRMENLNKKVDDGFLDIWTYNAELLVLLENERTLDFHDSNVKNLYEKVKS
QLKNNAKEIGNGCFEFYHKCDNECMESVRNGTYDYPKYSEESKLNREKVD
GVKLESMGIYQ
SEQ ID NO:24 PR/8 HA1-2mut
KGAAPLQLGKCNIAGWLLGNPECDPLLPVRSWSDIAETPNSENGICYPGD
FIDYEELREQLSSVSSFERFEIFPKESSWPNHNTNGVTAACSHEGKSSFY
RNLLWLTEKEGSYPKLKNSYVNKKGKEVLVLWGIHHPPNSKEQQNLYQNE
NAYVSVVTSNYNRRFTPEIAERPKVRDQAGRMNYYWTLLKPGDTIIFEAN
GNLIAPMYAFALSRGFGSGIITS
SEQ ID NO:25 PR/8 HA1-3mut
NSENEICYPGDFIDKEELREQLSSVSSFERFEIFPKESSWPNHNTNGVTA
ACSHEGKSSFYRNLLWLTEKEGSYPKLKNSYVNKKGKEVLVLWGIHHPPN
SKEQQNLYQNENAYVSVVTSNYNRRFTPEIAERPKVRDQAGRMNYYWTLL
KPGDTIIFEANGNLIAPMYAAALSRG
SEQ ID NO:26 VN HA1-2mut
GAKPLSLRDCSVAGWLLGNPMCDEFINVPEWSDIAEKANPVNDLCYPGDF
NDYEELKHLLSRINHFEKIQIIPKSSWSSHEASLGVSSACPYQGKSSFFR
NVVWLIKKNSTYPTIKRSYNNTNQEDLLVLWGIHHPNDAAEQTKLYQNPT
TYISVGTSTLNQRLVPRIATRSKVNGQSGRMEFFWTILKPNDAINFESNG
NFIAPEYAYKIVKKGDSTIMKSE
SEQ ID NO:27 VN HA1-3mut
NDLCYPGDFNDKEELKHLLSRINHFEKIQIIPKSSWSSHEASLGVSSACP
YQGKSSFFRNVVWLIKKNSTYPTIKRSYNNTNQEDLLVLWGIHHPNDAAE
QTKLYQNPTTYISVGTSTLNQRLVPRIATRSKVNGQSGRMEFFWTILKPN
DAINFESNGNFIAPEYAYKIAKKG
SEQ ID NO:28 IND HA1-2mut
GAKPLSLRDCSVAGWLLGNPMCDEFINVPEWSDIAEKANPTNDLCYPGSF
NDYEELKHLLSRINHFEKIQIIPKSSWSDHEASSGVSSACPYLGSPSFFR
NVVWLIKKNSTYPTIKKSYNNTNQEDLLVLWGIHHPNDAAEQTRLYQNPT
TYISIGTSTLNQRLVPKIATRSKVNGQSGRMEFFWTILKPNDAINFESNG
NFIAPEYAYKIVKKGDSAIMKSE
SEQ ID NO:29 IND HA1-3mut
NDLCYPGSFNDKEELKHLLSRINHFEKIQIIPKSSWSDHEASSGVSSACP
YLGSPSFFRNVVWLIKKNSTYPTIKKSYNNTNQEDLLVLWGIHHPNDAAE
QTRLYQNPTTYISIGTSTLNQRLVPKIATRSKVNGQSGRMEFFWTILKPN
DAINFESNGNFIAPEYAYKIAKKG
SEQ ID NO:30 NC HA1-2mut
KGAAPLQLGNCSVAGWILGNPECELLISKESWSDIAETPNPENGTCYPGY
FADYEELREQLSSVSSFERFEIFPKESSWPNHTVTGVSASCSHNGKSSFY
RNLLWLTGKNGLYPNLSKSYVNNKEKEVLVLWGVHHPPNIGNQRALYHTE
NAYVSVVSSHYSRRFTPEIAKRPKVRDQEGRINYYWTLLEPGDTTIFEAN
GNLIAPWYAFALSRGFGSGIITS
SEQ ID NO:31 NC HA1-3mut
NPENETCYPGYFADKEELREQLSSVSSFERFEIFPKESSWPNHTVTGVSA
SCSHNGKSSFYRNLLWLTGKNGLYPNLSKSYVNNKEKEVLVLWGVHHPPN
IGNQRALYHTENAYVSVVSSHYSRRFTPEIAKRPKVRDQEGRINYYWTLL
EPGDTIIFEANGNLIAPWYAAALSRG
SEQ ID NO:32 WIS HA1-2mut
SPHQALDGENCTLIDALLGDPQCDGFQNKKWDDFAERSKAYSNCYPYDVP
DYASLRSLVASSGTLEFNDESFNWTGVTQNGTSSACKRRSNNSFFSRLNW
LTHLKFKYPALNVTMPNNEKFDKLYIWGVHHPGTDNDQIFLHAQASGRIT
VSTKRSQQTVIPNIGSRPRIRNIPSRISIYWTIVKPGDILLINSTGNLIA
PRGYFKIRSGKSSIMRSD
SEQ ID NO:33 WIS HA1-3mut
SNCYPKDSPDEASLRSLVASSGTDEFNDESFNWTGVTQNGTSSACKRRSN
NSFFSRLNWLTHLKFKYPALNVTMPNNEKFDKLYIWGVHHPGTDNDQIFL
HAQASGRITVSTKRSQQTVIPNTGSRPRIRNIPSRISIYWTIVKPGDILL
INSTGNLIAPRGYFKIRSG
SEQ ID NO:34 A/Swine/Hong Kong/9/98 HA
(ACCESSION BAB85618)
DKICIGYQSTNSTETVDTLTETNVPVTHAKELLHTEHNGMLCATNLGHPL
ILDTCTIEGLIYGNPSCDLLLGGREWSYIVERPSAVNGMCYPGNVENLEE
LRSLFSSASSYQRIQIFPDTIWNVSYSGTSKACSDSFYRSMRWLTQKNNA
YPIQDAQYTNNRGKSILFMWGINHPPTDTVQTNLYTRTDTTTSVTTEDIN
RTFKPVIGPRPLVNGLHGRIDYYWSVLKPGQTLRVRSNGNLIAPWYGHIL
SGESHGRILKTDLNSGNCVVQCQTERGGLNTTLPFHNVSKYAFGNCPKYV
GVKSLKLAVGLRNVPARSSR
SEQ ID NO:35 A/Aichi/2/1968 HA (ACCESSION
BAF37221)
MKTIIALSYTFCLALGQDLPGNDNSTATLCLGHHAVPNGTLVKTITDDQI
EVTNATELVQSSSTGKICNNPHRILDGIDCTLIDALLGDPHCDVFQNETW
DLFVERSKAFSNCYPYDVPDYASLRSLVASSGTLEFITEGFTWTGVTQNG
GSNACKRGPGSGFFSRLNWLTKSGSTYPVLNVTMPNNDNFDKLYIWGIHH
PSTNQEQTSLYVQASGRVTVSTRRSQQTIIPNIGSRPWVRGLSSRISIYW
TIVKPGDVLVINSNGNLIAPRGYFKMRTGKSSIMRSDAPIDTCISECITP
NGSIPNDKPFQNVNKITYGACPKYVKQNTLKLATGMRNVPEKQTRGLFGA
IAGFIENGWEGMIDGWYGFRHQNSEGTGQAADLKSTQAAIDQINGKLNRV
IEKTNEKFHQIEKEFSEVEGRIQDLEKYVEDTKIDLWSYNAELLVALENQ
HTIDLTDSEMNKLFEKTRRQLRENAEEMGNGCFKIYHKCDNACIESIRNG
TYDHDVYRDEALNNRFQIKGVELKSGYKDWILWISFAISCFLLCVVLLGF
IMWACQRGNIRCNICI
SEQ ID NO:36 B/Lee/40 HA (Accession NP_056660)
MKAIIVLLMVVTSNADRICTGITSSNSPHVVKTATQGEVNVTGVIPLTTT
PTKSHFANLKGTQTRGKLCPNCFNCTDLDVALGRPKCMGNTPSAKVSILH
EVKPATSGCFPIMHDRTKIRQLPNLLRGYENIRLSTSNVINTETAPGGPY
KVGTSGSCPNVANGNGFFNTMAWVIPKDNNKTAINPVTVEVPYICSEGED
QITVWGFHSDDKTQMERLYGDSNPQKFTSSANGVTTHYVSQIGGFPNQTE
DEGLKQSGRIVVDYMVQKPGKTGTIVYQRGILLPQKVWCASGRSKVIKGS
LPLIGEADCLHEKYGGLNKSKPYYTGEHAKAIGNCPIWVKTPLKLANGTK
YRPPAKLLKERGFFGAIAGFLEGGWEGMIAGWHGYTSHGAHGVAVAADLK
STQEAINKITKNLNYLSELEVKNLQRLSGAMNELHDEILELDEKNDDLRA
DTISSQIELAVLLSNEGIINSEDEHLLALERKLKKMLGPSAVEIGNGCFE
TKHKCNQTCLDRIAAGTFNAGDFSLPTFDSLNITAASLNDDGLDNHTILL
YYSTAASSLAVTLMIATFIVYMVSRDNVSCSICL
SEQ ID NO:37 C/Johannesburg/1/66 (ACCESSION
AAW73083)
MFFSLLLVLGLTEAEKIKICLQKQVNSSFSLHNGFGGNLYATEEKRMFEL
VKPKAGASVLNQSTWIGFGDSRTDKSNSAFPRSADVSAKTADKFRSLSGG
SLMLSMFGPPGKVDYLYQGCGKHKVFYEGVNWSPHAAINCYRKNWTDIKL
NFQKNIYELASQSHCMSLVNALDKTIPLQVTAGTAGNCNNSFLKNPALYT
QEVKPSENKCGKENLAFFTLPTQFGTYECKLHLVASCYFIYDSKEVYNKR
GCDNYFQVIYDSSGKVVGGLDNRVSPYTGNSGDTPTMQCDMLQLKPGRYS
VRSSPRFLLMPERSYCFDMKEKGPVTAVQSIWGKGRESDYAVDQACLSTP
GCMLIQKQKPYIGEADDHHGDQEMRELLSGLDYEARCISQSGWVNETSPF
TEKYLLPPKFGRCPLAAKEESIPKIPDGLLIPTSGTDTTVTKPKSRIFGI
DDLIIGLLFVAIVEAGIGGYLLGSRKESGGGVTKESAEKGFEKIGNDIQI
LKSSINIAIEKLNDRISHDEQAIRDLTLEIENARSEALLGELGIIRALLV
GNISIGLQESLWELASEITNRAGDLAVEVSPGCWIIDNNICDQSCQNFIF
KFNETAPVPTIPPLDTKIDLQSDPFYWGSSLGLAITATISLAALVISGIA
ICRTK
SEQ ID NO:38 B/Lee/40 HA1-1
TTTPTKSHFANLKGTQTRGKLCPNCFNCTDLDVALGRPKCMGNTPSAKVS
ILHEVKPATSGCFPIMHDRTKIRQLPNLLRGYENIRLSTSNVINTETAPG
GPYKVGTSGSCPNVANGNGFFNTMAWVIPKDNNKTAINPVTVEVPYICSE
GEDQITVWGFHSDDKTQMERLYGDSNPQKFTSSANGVTTHYVSQIGGFPN
QTEDEGLKQSGRIVVDYMVQKPGKTGTIVYQRGILLPQKVWCASGRSKVI
KGSLPLIGEADCLHEKYGGLNKSKPYYTGEHAKAIGNCPIWVK
SEQ ID NO:39 B/Lee/40 HA1-2
KGTQTRGKLCPNCFNCTDLDVALGRPKCMGNTPSAKVSILHEVKPATSGC
FPIMHDRTKIRQLPNLLRGYENIRLSTSNVINTETAPGGPYKVGTSGSCP
NVANGNGFFNTMAWVIPKDNNKTAINPVTVEVPYICSEGEDQITVWGFHS
DDKTQMERLYGDSNPQKFTSSANGVTTHYVSQIGGFPNQTEDEGLKQSGR
IVVDYMVQKPGKTGTIVYQRGILLPQKVWCASGRSKVIKG
SEQ ID NO:40 A/Aichi/2/68 HA1-1
QSSSTGKICNNPHRILDGIDCTLIDALLGDPHCDVFQNETWDLFVERSKA
FSNCYPYDVPDYASLRSLVASSGTLEFITEGFTWTGVTQNGGSNACKRGP
GSGFFSRLNWLTKSGSTYPVLNVTMPNNDNFDKLYIWGIHHPSTNQEQTS
LYVQASGRVTVSTRRSQQTIIPNIGSRPWVRGLSSRISIYWTIVKPGDVL
VINSNGNLIAPRGYFKMRTGKSSIMRSDAPIDTCISECITPNGSIPNDKP
FQNVNKITYGACPKYVK
SEQ ID NO:41 A/Aichi/2/68 HA1-2
HRILDGIDCTLIDALLGDPHCDVFQNETWDLFVERSKAFSNCYPYDVPDY
ASLRSLVASSGTLEFITEGFTWTGVTQNGGSNACKRGPGSGFFSRLNWLT
KSGSTYPVLNVTMPNNDNFDKLYIWGIHHPSTNQEQTSLYVQASGRVTVS
TRRSQQTIIPNIGSRPWVRGLSSRISIYWTIVKPGDVLVINSNGNLIAPR
GYFKMRTGKSSIMRSD
SEQ ID NO:42 B/Malaysia/2506/2004 HA (Accession
ISDN126672)
IVLLMVVTSNADRICTGITSSNSPHVVKTATQGEVNVTGVIPLTTTPTKS
HFANLKGTETRGKLCPKCLNCTDLDVALGRPKCTGNIPSARVSILHEVRP
VTSGCFPIMHDRTKIRQLPNLLRGYEHIRLSTHNVINAENAPGGSYKIGT
SGSCPNVTNGNGFFATMAWAVPKNDNNKTATNSLTIEVPYICTEGEDQIT
VWGFHSDNEAQMAKLYGDSKPQKFTSSANGVTTHYVSQIGGFPNQTEDGG
LPQSGRIVVDYMVQKSGKTGTITYQRGILLPQKVWCASGRSKVIKGSLPL
IGEADCLHEKYGGLNKSKPYYTGEHAKAIGNCPIWVKTPLKLANGTKYRP
PAKLLKER
SEQ ID NO:43 B/Ohio/1/2005 HA (Accession
ISDN133312)
DRICTGITSSNSPHVVKTATQGEVNVTGVIPLTTTPTKSHFANLKGTKTR
GKLCPKCLNCTDLDVALGRPKCTGNIPSAEVSILHEVRPVTSGCFPIMHD
RTKIRQLPNLLRGYEHIRLSTHNVINAEKAPGGPYKIGTSGSCPNVTNGN
GFFATMAWAVPKNDNNKTATNSLTIEVPYICTEGEDQITIWGFHSDSETQ
MAKLYGDSKPQKFTSSANGVTTHYVSQIGGFPNQTEDGGLPQSGRIVVDY
MVQKSGKTGTITYQRGILLPQKVWCASGRSKVIKGSLPLIGEADCLHEKY
GGLNKSKPYYTGEHAKAIGNCPIWVKTPLKLANGTKYRPPAKLLKERGF
SEQ ID NO:44 B/Shanghai/361/2002 HA (Accession
ISDN80784)
DRICTGITSSNSPHVVKTATQGEVNVTGVIPLTTTPIKSHFANLKGTRTR
GKLCPDCLNCTDLDVALGRPMCVGTTPSAKASILHEVRPVTSGCFPIMHD
RTKIRQLPNLLRGYENIRLSTQNVIDAEKALGGPYRLGTSGSCPNATSKS
GFFATMAWAVPKDNNKNATNPLTVEVPYICTEGEDQITVWGFHSDDKTQM
KNLYGDSNPQKFTSSANGVTTHYVSQIGGFPDQTEDGGLPQSGRIVVDYM
VQKPGKTGTIVYQRGVLLPQKVWCASGRSKVIKGSLPLIGEADCLHEKYG
GLNKSKPYYTGEHAKAIGHCPIWVKTPLKLANGTKYRP
SEQ ID NO:45 B/Malaysia/2506/2004 HA1-1
TTTPTKSHFANLKGTETRGKLCPKCLNCTDLDVALGRPKCTGNIPSARVS
ILHEVRPVTSGCFPIMHDRTKIRQLPNLLRGYEHIRLSTHNVINAENAPG
GSYKIGTSGSCPNVTNGNGFFATMAWAVPKNDNNKTATNSLTIEVPYICT
EGEDQITVWGFHSDNEAQMAKLYGDSKPQKFTSSANGVTTHYVSQIGGFP
NQTEDGGLPQSGRIVVDYMVQKSGKTGTITYQRGILLPQKVWCASGRSKV
TKGSLPLIGEADCLHEKYGGLNKSKPYYTGEHAKAIGNCPIWVK
SEQ ID NO:46 B/Malaysia/2506/2004 HA1-2
KGTETRGKLCPKCLNCTDLDVALGRPKCTGNIPSARVSILHEVRPVTSGC
FPIMHDRTKIRQLPNLLRGYEHIRLSTHNVINAENAPGGSYKIGTSGSCP
NVTNGNGFFATMAWAVPKNDNNKTATNSLTIEVPYICTEGEDQITVWGFH
SDNEAQMAKLYGDSKPQKFTSSANGVTTHYVSQIGGFPNQTEDGGLPQSG
RIVVDYMVQKSGKTGTITYQRGILLPQKVWCASGRSKVIKG
SEQ ID NO:47 B/Ohio/1/2005 HA1-1
TTTPTKSHFANLKGTKTRGKLCPKCLNCTDLDVALGRPKCTGNIPSAEVS
ILHEVRPVTSGCFPIMHDRTKIRQLPNLLRGYEHIRLSTHNVINAEKAPG
GPYKIGTSGSCPNVTNGNGFFATMAWAVPKNDNNKTATNSLTIEVPYICT
EGEDQITIWGFHSDSETQMAKLYGDSKPQKFTSSANGVTTHYVSQIGGFP
NQTEDGGLPQSGRIVVDYMVQKSGKTGTITYQRGILLPQKVWCASGRSKV
IKGSLPLIGEADCLHEKYGGLNKSKPYYTGEHAKAIGNCPIWVK
SEQ ID NO:48 B/Ohio/1/2005 HA1-2
KGTKTRGKLCPKCLNCTDLDVALGRPKCTGNIPSAEVSILHEVRPVTSGC
FPIMHDRTKIRQLPNLLRGYEHIRLSTHNVINAEKAPGGPYKIGTSGSCP
NVTNGNGFFATMAWAVPKNDNNKTATNSLTIEVPYICTEGEDQITIWGFH
SDSETQMAKLYGDSKPQKFTSSANGVTTHYVSQIGGFPNQTEDGGLPQSG
RIVVDYMVQKSGKTGTITYQRGILLPQKVWCASGRSKVIKG
SEQ ID NO:49 B/Shanghai/361/2002 HA1-1
TTTPIKSHFANLKGTRTRGKLCPDCLNCTDLDVALGRPMCVGTTPSAKAS
ILHEVRPVTSGCFPIMHDRTKIRQLPNLLRGYENIRLSTQNVIDAEKALG
GPYRLGTSGSCPNATSKSGFFATMAWAVPKDNNKNATNPLTVEVPYICTE
GEDQITVWGFHSDDKTQMKNLYGDSNPQKFTSSANGVTTHYVSQIGGFPD
QTEDGGLPQSGRIVVDYMVQKPGKTGTIVYQRGVLLPQKVWCASGRSKVI
KGSLPLIGEADCLHEKYGGLNKSKPYYTGEHAKAIGHCPIWVK
SEQ ID NO:50 B/Shanghai/361/2002 HA1-2
KGTRTRGKLCPDCLNCTDLDVALGRPMCVGTTPSAKASILHEVRPVTSGC
FPIMHDRTKIRQLPNLLRGYENIRLSTQNVIDAEKALGGPYRLGTSGSCP
NATSKSGFFATMAWAVPKDNNKNATNPLTVEVPYICTEGEDQITVWGFHS
DDKTQMKNLYGDSNPQKFTSSANGVTTHYVSQIGGFPDQTEDGGLPQSGR
IVVDYMVQKPGKTGTIVYQRGVLLPQKVWCASGRSKVIKG
SEQ ID NO:51 STF2.blp
ATGGCACAAGTAATCAACACTAACAGTCTGTCGCTGCTGACCCAGAATAA
CCTGAACAAATCCCAGTCCGCACTGGGCACCGCTATCGAGCGTCTGTCTT
CTGGTCTGCGTATCAACAGCGCGAAAGACGATGCGGCAGGTCAGGCGATT
GCTAACCGTTTCACCGCGAACATCAAAGGTCTGACTCAGGCTTCCCGTAA
CGCTAACGACGGTATCTCCATTGCGCAGACCACTGAAGGCGCGCTGAACG
AAATCAACAACAACCTGCAGCGTGTGCGTGAACTGGCGGTTCAGTCTGCT
AACAGCACCAACTCCCAGTCTGACCTCGACTCCATCCAGGCTGAAATCAC
CCAGCGCCTGAACGAAATCGACCGTGTATCCGGCCAGACTCAGTTCAACG
GCGTGAAAGTCCTGGCGCAGGACAACACCCTGACCATCCAGGTTGGCGCC
AACGACGGTGAAACTATCGATATCGATCTGAAGCAGATCAACTCTCAGAC
CCTGGGTCTGGACTCACTGAACGTGCAGAAAGCGTATGATGTGAAAGATA
CAGCAGTAACAACGAAAGCTTATGCCAATAATGGTACTACACTGGATGTA
TCGGGTCTTGATGATGCAGCTATTAAAGCGGCTACGGGTGGTACGAATGG
TACGGCTTCTGTAACCGGTGGTGCGGTTAAATTTGACGCAGATAATAACA
AGTACTTTGTTACTATTGGTGGCTTTACTGGTGCTGATGCCGCCAAAAAT
GGCGATTATGAAGTTAACGTTGCTACTGACGGTACAGTAACCCTTGCGGC
TGGCGCAACTAAAACCACAATGCCTGCTGGTGCGACAACTAAAACAGAAG
TACAGGAGTTAAAAGATACACCGGCAGTTGTTTCAGCAGATGCTAAAAAT
GCCTTAATTGCTGGCGGCGTTGACGCTACCGATGCTAATGGCGCTGAGTT
GGTCAAAATGTCTTATACCGATAAAAATGGTAAGACAATTGAAGGCGGTT
ATGCGCTTAAAGCTGGCGATAAGTATTACGCCGCAGATTACGATGAAGCG
ACAGGAGCAATTAAAGCTAAAACTACAAGTTATACTGCTGCTGACGGCAC
TACCAAAACAGCGGCTAACCAACTGGGTGGCGTAGACGGTAAAACCGAAG
TCGTTACTATCGACGGTAAAACCTACAATGCCAGCAAAGCCGCTGGTCAT
GATTTCAAAGCACAACCAGAGCTGGCGGAAGCAGCCGCTAAAACCACCGA
AAACCCGCTGCAGAAAATTGATGCCGCGCTGGCGCAGGTGGATGCGCTGC
GCTCTGATCTGGGTGCGGTACAAAACCGTTTCAACTCTGCTATCACCAAC
CTGGGCAATACCGTAAACAATCTGTCTGAAGCGCGTAGCCGTATCGAAGA
TTCCGACTACGCGACCGAAGTTTCCAACATGTCTCGCGCGCAGATTCTGC
AGCAGGCCGGTACTTCCGTTCTGGCGCAGGCTAACCAGGTCCCGCAGAAC
GTGCTGAGCCTGTTACGT
SEQ ID NO:52 STF2.SG
ATGGCACAAGTAATCAACACTAACAGTCTGTCGCTGCTGACCCAGAATAA
CCTGAACAAATCCCAGTCCGCACTGGGCACCGCTATCGAGCGTCTGTCTT
CTGGTCTGCGTATCAACAGCGCGAAAGACGATGCGGCAGGTCAGGCGATT
GCTAACCGTTTCACCGCGAACATCAAAGGTCTGACTCAGGCTTCCCGTAA
CGCTAACGACGGTATCTCCATTGCGCAGACCACTGAAGGCGCGCTGAACG
AAATCAACAACAACCTGCAGCGTGTGCGTGAACTGGCGGTTCAGTCTGCT
AACAGCACCAACTCCCAGTCTGACCTCGACTCCATCCAGGCTGAAATCAC
CCAGCGCCTGAACGAAATCGACCGTGTATCCGGCCAGACTCAGTTCAACG
GCGTGAAAGTCCTGGCGCAGGACAACACCCTGACCATCCAGGTTGGCGCC
AACGACGGTGAAACTATCGATATCGATCTGAAGCAGATCAACTCTCAGAC
CCTGGGTCTGGACTCACTGAACGTGCAGAAAGCGTATGATGTGAAAGATA
CAGCAGTAACAACGAAAGCTTATGCCAATAATGGTACTACACTGGATGTA
TCGGGTCTTGATGATGCAGCTATTAAAGCGGCTACGGGTGGTACGAATGG
TACGGCTTCTGTAACCGGTGGTGCGGTTAAATTTGACGCAGATAATAACA
AGTACTTTGTTACTATTGGTGGCTTTACTGGTGCTGATGCCGCCAAAAAT
GGCGATTATGAAGTTAACGTTGCTACTGACGGTACAGTAACCCTTGCGGC
TGGCGCAACTAAAACCACAATGCCTGCTGGTGCGACAACTAAAACAGAAG
TACAGGAGTTAAAAGATACACCGGCAGTTGTTTCAGCAGATGCTAAAAAT
GCCTTAATTGCTGGCGGCGTTGACGCTACCGATGCTAATGGCGCTGAGTT
GGTCAAAATGTCTTATACCGATAAAAATGGTAAGACAATTGAAGGCGGTT
ATGCGCTTAAAGCTGGCGATAAGTATTACGCCGCAGATTACGATGAAGCG
ACAGGAGCAATTAAAGCTAAAACTACAAGTTATACTGCTGCTGACGGCAC
TACCAAAACAGCGGCTAACCAACTGGGTGGCGTAGACGGTAAAACCGAAG
TCGTTACTATCGACGGTAAAACCTACAATGCCAGCAAAGCCGCTGGTCAT
GATTTCAAAGCACAACCAGAGCTGGCGGAAGCAGCCGCTAAAACCACCGA
AAACCCGCTGCAGAAAATTGATGCCGCGCTGGCGCAGGTGGATGCGCTGC
GCTCTGATCTGGGTGCGGTACAAAACCGTTTCAACTCTGCTATCACCAAC
CTGGGCAATACCGTAAACAATCTGTCTGAAGCGCGTAGCCGTATCGAAGA
TTCCGACTACGCGACCGAAGTTTCCAACATGTCTCGCGCGCAGATTCTGC
AGCAGGCCGGTACTTCCGTTCTGGCGCAGGCTAACCAGGTCCCGCAGAAC
GTGCTGTCTCTGTTACGTAGCGGCAGTGGTAGCGGATCC
SEQ ID NO:53 STF2.HA1-1 PR8
ATGGCACAAGTAATCAACACTAACAGTCTGTCGCTGCTGACCCAGAATAA
CCTGAACAAATCCCAGTCCGCACTGGGCACCGCTATCGAGCGTCTGTCTT
CTGGTCTGCGTATCAACAGCGCGAAAGACGATGCGGCAGGTCAGGCGATT
GCTAACCGTTTCACCGCGAACATCAAAGGTCTGACTCAGGCTTCCCGTAA
CGCTAACGACGGTATCTCCATTGCGCAGACCACTGAAGGCGCGCTGAACG
AAATCAACAACAACCTGCAGCGTGTGCGTGAACTGGCGGTTCAGTCTGCT
AACAGCACCAACTCCCAGTCTGACCTCGACTCCATCCAGGCTGAAATCAC
CCAGCGCCTGAACGAAATCGACCGTGTATCCGGCCAGACTCAGTTCAACG
GCGTGAAAGTCCTGGCGCAGGACAACACCCTGACCATCCAGGTTGGCGCC
AACGACGGTGAAACTATCGATATCGATCTGAAGCAGATCAACTCTCAGAC
CCTGGGTCTGGACTCACTGAACGTGCAGAAAGCGTATGATGTGAAAGATA
CAGCAGTAACAACGAAAGCTTATGCCAATAATGGTACTACACTGGATGTA
TCGGGTCTTGATGATGCAGCTATTAAAGCGGCTACGGGTGGTACGAATGG
TACGGCTTCTGTAACCGGTGGTGCGGTTAAATTTGACGCAGATAATAACA
AGTACTTTGTTACTATTGGTGGCTTTACTGGTGCTGATGCCGCCAAAAAT
GGCGATTATGAAGTTAACGTTGCTACTGACGGTACAGTAACCCTTGCGGC
TGGCGCAACTAAAACCACAATGCCTGCTGGTGCGACAACTAAAACAGAAG
TACAGGAGTTAAAAGATACACCGGCAGTTGTTTCAGCAGATGCTAAAAAT
GCCTTAATTGCTGGCGGCGTTGACGCTACCGATGCTAATGGCGCTGAGTT
GGTCAAAATGTCTTATACCGATAAAAATGGTAAGACAATTGAAGGCGGTT
ATGCGCTTAAAGCTGGCGATAAGTATTACGCCGCAGATTACGATGAAGCG
ACAGGAGCAATTAAAGCTAAAACCACAAGTTATACTGCTGCTGACGGCAC
TACCAAAACAGCGGCTAACCAACTGGGTGGCGTAGACGGTAAAACCGAAG
TCGTTACTATCGACGGTAAAACCTACAATGCCAGCAAAGCCGCTGGTCAT
GATTTCAAAGCACAACCAGAGCTGGCGGAAGCAGCCGCTAAAACCACCGA
AAACCCGCTGCAGAAAATTGATGCCGCGCTGGCGCAGGTGGATGCGCTGC
GCTCTGATCTGGGTGCGGTACAAAACCGTTTCAACTCTGCTATCACCAAC
CTGGGCAATACCGTAAACAATCTGTCTGAAGCGCGTAGCCGTATCGAAGA
TTCCGACTACGCGACCGAAGTTTCCAACATGTCTCGCGCGCAGATTTTGC
AGCAGGCCGGTACTTCCGTTCTGGCGCAGGCTAACCAGGTCCCGCAGAAC
GTGCTGTCTCTGTTACGTAGCGGCAGTGGTAGCGGATCCTCTCATAACGG
TAAACTGTGTCGTCTGAAAGGTATTGCACCACTGCAGCTGGGCAAATGCA
ACATCGCGGGTTGGCTGCTGGGTAACCCTGAATGTGACCCGCTGCTGCCG
GTTCGTTCCTGGAGCTACATTGTTGAAACCCCGAACTCCGAAAACGGTAT
CTGCTACCCGGGCGACTTTATTGACTATGAAGAACTGCGTGAGCAGCTGT
CTTCCGTGAGCAGCTTTGAACGCTTCGAAATCTTCCCGAAGGAAAGCTCC
TGGCCGAACCACAACACTAACGGCGTGACGGCGGCTTGCTCCCACGAAGG
CAAATCTTCCTTTTATCGTAACCTGCTGTGGCTGACTGAAAAGGAAGGTT
CCTACCCAAAACTGAAAAACAGCTATGTTAACAAAAAGGGTAAAGAAGTC
CTGGTGCTGTGGGGCATCCACCACCCGCCGAACTCCAAGGAACAGCAGAA
TCTGTATCAGAACGAAAACGCATACGTTTCTGTCGTTACTTCCAACTATA
ACCGTCGTTTCACTCCGGAAATCGCGGAACGTCCGAAAGTACGCGACCAG
GCTGGCCGTATGAACTACTACTGGACCCTGCTGAAACCGGGTGACACTAT
TATCTTCGAAGCTAACGGTAACCTGATCGCACCAATGTACGCTTTCGCAC
TGTCTCGTGGTTTCGGTTCCGGCATTATCACCAGCAACGCGTCTATGCAC
GAATGCAACACGAAATGTCAGACGCCGCTGGGCGCAATTAATAGCAGCCT
GCCGTACCAGAACATCCACCCGGTGACTATCGGCGAATGCCCGAAGTATG
TTCGTTAATAG
SEQ ID NO:54 STF2.HA1-1.his PR8
ATGGCACAAGTAATCAACACTAACAGTCTGTCGCTGCTGACCCAGAATAA
CCTGAACAAATCCCAGTCCGCACTGGGCACCGCTATCGAGCGTCTGTCTT
CTGGTCTGCGTATCAACAGCGCGAAAGACGATGCGGCAGGTCAGGCGATT
GCTAACCGTTTCACCGCGAACATCAAAGGTCTGACTCAGGCTTCCCGTAA
CGCTAACGACGGTATCTCCATTGCGCAGACCACTGAAGGCGCGCTGAACG
AAATCAACAACAACCTGCAGCGTGTGCGTGAACTGGCGGTTCAGTCTGCT
AACAGCACCAACTCCCAGTCTGACCTCGACTCCATCCAGGCTGAAATCAC
CCAGCGCCTGAACGAAATCGACCGTGTATCCGGCCAGACTCAGTTCAACG
GCGTGAAAGTCCTGGCGCAGGACAACACCCTGACCATCCAGGTTGGCGCC
AACGACGGTGAAACTATCGATATCGATCTGAAGCAGATCAACTCTCAGAC
CCTGGGTCTGGACTCACTGAACGTGCAGAAAGCGTATGATGTGAAAGATA
CAGCAGTAACAACGAAAGCTTATGCCAATAATGGTACTACACTGGATGTA
TCGGGTCTTGATGATGCAGCTATTAAAGCGGCTACGGGTGGTACGAATGG
TACGGCTTCTGTAACCGGTGGTGCGGTTAAATTTGACGCAGATAATAACA
AGTACTTTGTTACTATTGGTGGCTTTACTGGTGCTGATGCCGCCAAAAAT
GGCGATTATGAAGTTAACGTTGCTACTGACGGTACAGTAACCCTTGCGGC
TGGCGCAACTAAAACCACAATGCCTGCTGGTGCGACAACTAAAACAGAAG
TACAGGAGTTAAAAGATACACCGGCAGTTGTTTCAGCAGATGCTAAAAAT
GCCTTAATTGCTGGCGGCGTTGACGCTACCGATGCTAATGGCGCTGAGTT
GGTCAAAATGTCTTATACCGATAAAAATGGTAAGACAATTGAAGGCGGTT
ATGCGCTTAAAGCTGGCGATAAGTATTACGCCGCAGATTACGATGAAGCG
ACAGGAGCAATTAAAGCTAAAACCACAAGTTATACTGCTGCTGACGGCAC
TACCAAAACAGCGGCTAACCAACTGGGTGGCGTAGACGGTAAAACCGAAG
TCGTTACTATCGACGGTAAAACCTACAATGCCAGCAAAGCCGCTGGTCAT
GATTTCAAAGCACAACCAGAGCTGGCGGAAGCAGCCGCTAAAACCACCGA
AAACCCGCTGCAAAAAATTGATGCCGCGCTGGCGCAGGTGGATGCGCTGC
GCTCTGATCTGGGTGCGGTACAAAACCGTTTCAACTCTGCTATCACCAAC
CTGGGCAATACCGTAAACAATCTGTCTGAAGCGCGTAGCCGTATCGAAGA
TTCCGACTACGCGACCGAAGTTTCCAACATGTCTCGCGCGCAGATTTTGC
AGCAGGCCGGTACTTCCGTTCTGGCGCAGGCTAACCAGGTCCCGCAGAAC
GTGCTGTCTCTGTTACGTAGCGGCAGTGGTAGCGGATCCTCTCATAACGG
TAAACTGTGTCGTCTGAAAGGTATTGCACCACTGCAGCTGGGCAAATGCA
ACATCGCGGGTTGGCTGCTGGGTAACCCTGAATGTGACCCGCTGCTGCCG
GTTCGTTCCTGGAGCTACATTGTTGAAACCCCGAACTCCGAAAACGGTAT
CTGCTACCCGGGCGACTTTATTGACTATGAAGAACTGCGTGAGCAGCTGT
CTTCCGTGAGCAGCTTTGAACGCTTCGAAATCTTCCCGAAGGAAAGCTCC
TGGCCGAACCACAACACTAACGGCGTGACGGCGGCTTGCTCCCACGAAGG
CAAATCTTCCTTTTATCGTAACCTGCTGTGGCTGACTGAAAAGGAAGGTT
CCTACCCAAAACTGAAAAACAGCTATGTTAACAAAAAGGGTAAAGAAGTC
CTGGTGCTGTGGGGCATCCACCACCCGCCGAACTCCAAGGAACAGCAGAA
TCTGTATCAGAACGAAAACGCATACGTTTCTGTCGTTACTTCCAACTATA
ACCGTCGTTTCACTCCGGAAATCGCGGAACGTCCGAAAGTACGCGACCAG
GCTGGCCGTATGAACTACTACTGGACCCTGCTGAAACCGGGTGACACTAT
TATCTTCGAAGCTAACGGTAACCTGATCGCACCAATGTACGCTTTCGCAC
TGTCTCGTGGTTTCGGTTCCGGCATTATCACCAGCAACGCGTCTATGCAC
GAATGCAACACGAAATGTCAGACGCCGCTGGGCGCAATTAATAGCAGCCT
GCCGTACCAGAACATCCACCCGGTGACTATCGGCGAATGCCCGAAGTATG
TTCGTCATCACCATCATCACCATTAATAG
SEQ ID NO:55 STF2.HA1-2 PR8
ATGGCACAAGTAATCAACACTAACAGTCTGTCGCTGCTGACCCAGAATAA
CCTGAACAAATCCCAGTCCGCACTGGGCACCGCTATCGAGCGTCTGTCTT
CTGGTCTGCGTATCAACAGCGCGAAAGACGATGCGGCAGGTCAGGCGATT
GCTAACCGTTTCACCGCGAACATCAAAGGTCTGACTCAGGCTTCCCGTAA
CGCTAACGACGGTATCTCCATTGCGCAGACCACTGAAGGCGCGCTGAACG
AAATCAACAACAACCTGCAGCGTGTGCGTGAACTGGCGGTTCAGTCTGCT
AACAGCACCAACTCCCAGTCTGACCTCGACTCCATCCAGGCTGAAATCAC
CCAGCGCCTGAACGAAATCGACCGTGTATCCGGCCAGACTCAGTTCAACG
GCGTGAAAGTCCTGGCGCAGGACAACACCCTGACCATCCAGGTTGGCGCC
AACGACGGTGAAACTATCGATATCGATCTGAAGCAGATCAACTCTCAGAC
CCTGGGTCTGGACTCACTGAACGTGCAGAAAGCGTATGATGTGAAAGATA
CAGCAGTAACAACGAAAGCTTATGCCAATAATGGTACTACACTGGATGTA
TCGGGTCTTGATGATGCAGCTATTAAAGCGGCTACGGGTGGTACGAATGG
TACGGCTTCTGTAACCGGTGGTGCGGTTAAATTTGACGCAGATAATAACA
AGTACTTTGTTACTATTGGTGGCTTTACTGGTGCTGATGCCGCCAAAAAT
GGCGATTATGAAGTTAACGTTGCTACTGACGGTACAGTAACCCTTGCGGC
TGGCGCAACTAAAACCACAATGCCTGCTGGTGCGACAACTAAAACAGAAG
TACAGGAGTTAAAAGATACACCGGCAGTTGTTTCAGCAGATGCTAAAAAT
GCCTTAATTGCTGGCGGCGTTGACGCTACCGATGCTAATGGCGCTGAGTT
GGTCAAAATGTCTTATACCGATAAAAATGGTAAGACAATTGAAGGCGGTT
ATGCGCTTAAAGCTGGCGATAAGTATTACGCCGCAGATTACGATGAAGCG
ACAGGAGCAATTAAAGCTAAAACTACAAGTTATACTGCTGCTGACGGCAC
TACCAAAACAGCGGCTAACCAACTGGGTGGCGTAGACGGTAAAACCGAAG
TCGTTACTATCGACGGTAAAACCTACAATGCCAGCAAAGCCGCTGGTCAT
GATTTCAAAGCACAACCAGAGCTGGCGGAAGCAGCCGCTAAAACCACCGA
AAACCCGCTGCAGAAAATTGATGCCGCGCTGGCGCAGGTGGATGCGCTGC
GCTCTGATCTGGGTGCGGTACAAAACCGTTTCAACTCTGCTATCACCAAC
CTGGGCAATACCGTAAACAATCTGTCTGAAGCGCGTAGCCGTATCGAAGA
TTCCGACTACGCGACCGAAGTTTCCAACATGTCTCGCGCGCAGATTCTGC
AGCAGGCCGGTACTTCCGTTCTGGCGCAGGCTAACCAGGTCCCGCAGAAC
GTGCTGTCTCTGTTACGTTCTGGTTCTGGTTCTGGTTCTAAAGGTATTGC
TCCACTGCAACTGGGTAAATGCAATATTGCGGGTTGGCTGCTGGGCAACC
CGGAATGCGATCCGCTGCTGCCGGTCCGTTCCTGGAGCTATATTGTTGAA
ACTCCGAACTCTGAGAACGGCATCTGCTATCCAGGTGATTTCATTGACTA
TGAGGAACTGCGTGAACAACTGTCTTCCGTGTCTTCCTTTGAACGTTTCG
AGATTTTTCCTAAAGAATCTTCTTGGCCGAACCATAACACTAATGGTGTT
ACCGCTGCGTGCTCTCATGAAGGTAAATCTAGCTTTTACCGCAACCTGCT
GTGGCTGACCGAGAAAGAAGGTTCTTACCCGAAACTGAAAAACAGCTACG
TAAACAAAAAGGGCAAGGAAGTTCTGGTCCTGTGGGGTATCCACCATCCG
CCGAACAGCAAGGAACAGCAGAATCTGTATCAGAACGAAAACGCATACGT
ATCTGTTGTTACTTCTAACTACAACCGCCGTTTCACCCCTGAAATCGCGG
AACGTCCGAAAGTGCGTGACCAGGCAGGCCGCATGAACTATTACTGGACC
CTGCTGAAGCCGGGTGATACTATCATCTTCGAAGCGAACGGTAACCTGAT
CGCCCCGATGTACGCGTTCGCTCTGAGCCGTGGCTTCGGCTCTGGTATCA
TTACGTCTTAATAA
SEQ ID NO:56 STF2.HA1-2mut PR8
ATGGCACAAGTAATCAACACTAACAGTCTGTCGCTGCTGACCCAGAATAA
CCTGAACAAATCCCAGTCCGCACTGGGCACCGCTATCGAGCGTCTGTCTT
CTGGTCTGCGTATCAACAGCGCGAAAGACGATGCGGCAGGTCAGGCGATT
GCTAACCGTTTCACCGCGAACATCAAAGGTCTGACTCAGGCTTCCCGTAA
CGCTAACGACGGTATCTCCATTGCGCAGACCACTGAAGGCGCGCTGAACG
AAATCAACAACAACCTGCAGCGTGTGCGTGAACTGGCGGTTCAGTCTGCT
AACAGCACCAACTCCCAGTCTGACCTCGACTCCATCCAGGCTGAAATCAC
CCAGCGCCTGAACGAAATCGACCGTGTATCCGGCCAGACTCAGTTCAACG
GCGTGAAAGTCCTGGCGCAGGACAACACCCTGACCATCCAGGTTGGCGCC
AACGACGGTGAAACTATCGATATCGATCTGAAGCAGATCAACTCTCAGAC
CCTGGGTCTGGACTCACTGAACGTGCAGAAAGCGTATGATGTGAAAGATA
CAGCAGTAACAACGAAAGCTTATGCCAATAATGGTACTACACTGGATGTA
TCGGGTCTTGATGATGCAGCTATTAAAGCGGCTACGGGTGGTACGAATGG
TACGGCTTCTGTAACCGGTGGTGCGGTTAAATTTGACGCAGATAATAACA
AGTACTTTGTTACTATTGGTGGCTTTACTGGTGCTGATGCCGCCAAAAAT
GGCGATTATGAAGTTAACGTTGCTACTGACGGTACAGTAACCCTTGCGGC
TGGCGCAACTAAAACCACAATGCCTGCTGGTGCGACAACTAAAACAGAAG
TACAGGAGTTAAAAGATACACCGGCAGTTGTTTCAGCAGATGCTAAAAAT
GCCTTAATTGCTGGCGGCGTTGACGCTACCGATGCTAATGGCGCTGAGTT
GGTCAAAATGTCTTATACCGATAAAAATGGTAAGACAATTGAAGGCGGTT
ATGCGCTTAAAGCTGGCGATAAGTATTACGCCGCAGATTACGATGAAGCG
ACAGGAGCAATTAAAGCTAAAACCACAAGTTATACTGCTGCTGACGGCAC
TACCAAAACAGCGGCTAACCAACTGGGTGGCGTAGACGGTAAAACCGAAG
TCGTTACTATCGACGGTAAAACCTACAATGCCAGCAAAGCCGCTGGTCAT
GATTTCAAAGCACAACCAGAGCTGGCGGAAGCAGCCGCTAAAACCACCGA
AAACCCGCTGCAGAAAATTGATGCCGCGCTGGCGCAGGTGGATGCGCTGC
GCTCTGATCTGGGTGCGGTACAAAACCGTTTCAACTCTGCTATCACCAAC
CTGGGCAATACCGTAAACAATCTGTCTGAAGCGCGTAGCCGTATCGAAGA
TTCCGACTACGCGACCGAAGTTTCCAACATGTCTCGCGCGCAGATTTTGC
AGCAGGCCGGTACTTCCGTTCTGGCGCAGGCTAACCAGGTCCCGCAGAAC
GTGCTGTCTCTGTTAGCGAGCGGCAGTGGTAGCGGATCCAAAGGTGCGGC
TCCACTGCAACTGGGTAAATGCAATATTGCGGGTTGGCTGCTGGGCAACC
CGGAATGCGATCCGCTGCTGCCGGTCCGTTCCTGGAGCGATATTGCGGAA
ACTCCGAACTCTGAGAACGGCATCTGCTATCCAGGTGATTTCATTGACTA
TGAGGAACTGCGTGAACAACTGTCTTCCGTGTCTTCCTTTGAACGTTTCG
AGATTTTTCCTAAAGAATCTTCTTGGCCGAACCATAACACTAATGGTGTT
ACCGCTGCGTGCTCTCATGAAGGTAAATCTAGCTTTTACCGCAACCTGCT
GTGGCTGACCGAGAAAGAAGGTTCTTACCCGAAACTGAAAAACAGCTACG
TAAACAAAAAGGGCAAGGAAGTTCTGGTCCTGTGGGGTATCCACCATCCG
CCGAACAGCAAGGAACAGCAGAATCTGTATCAGAACGAAAACGCATACGT
ATCTGTTGTTACTTCTAACTACAACCGCCGTTTCACCCCTGAAATCGCGG
AACGTCCGAAAGTGCGTGACCAGGCAGGCCGCATGAACTATTACTGGACC
CTGCTGAAGCCGGGTGATACTATCATCTTCGAAGCGAACGGTAACCTGAT
CGCCCCGATGTACGCGTTCGCTCTGAGCCGTGGCTTCGGCTCTGGTATCA
TTACGTCTTAATAA
SEQ ID NO:57 STF2.HA1-3 PR8
ATGGCACAAGTAATCAACACTAACAGTCTGTCGCTGCTGACCCAGAATAA
CCTGAACAAATCCCAGTCCGCACTGGGCACCGCTATCGAGCGTCTGTCTT
CTGGTCTGCGTATCAACAGCGCGAAAGACGATGCGGCAGGTCAGGCGATT
GCTAACCGTTTCACCGCGAACATCAAAGGTCTGACTCAGGCTTCCCGTAA
CGCTAACGACGGTATCTCCATTGCGCAGACCACTGAAGGCGCGCTGAACG
AAATCAACAACAACCTGCAGCGTGTGCGTGAACTGGCGGTTCAGTCTGCT
AACAGCACCAACTCCCAGTCTGACCTCGACTCCATCCAGGCTGAAATCAC
CCAGCGCCTGAACGAAATCGACCGTGTATCCGGCCAGACTCAGTTCAACG
GCGTGAAAGTCCTGGCGCAGGACAACACCCTGACCATCCAGGTTGGCGCC
AACGACGGTGAAACTATCGATATCGATCTGAAGCAGATCAACTCTCAGAC
CCTGGGTCTGGACTCACTGAACGTGCAGAAAGCGTATGATGTGAAAGATA
CAGCAGTAACAACGAAAGCTTATGCCAATAATGGTACTACACTGGATGTA
TCGGGTCTTGATGATGCAGCTATTAAAGCGGCTACGGGTGGTACGAATGG
TACGGCTTCTGTAACCGGTGGTGCGGTTAAATTTGACGCAGATAATAACA
AGTACTTTGTTACTATTGGTGGCTTTACTGGTGCTGATGCCGCCAAAAAT
GGCGATTATGAAGTTAACGTTGCTACTGACGGTACAGTAACCCTTGCGGC
TGGCGCAACTAAAACCACAATGCCTGCTGGTGCGACAACTAAAACAGAAG
TACAGGAGTTAAAAGATACACCGGCAGTTGTTTCAGCAGATGCTAAAAAT
GCCTTAATTGCTGGCGGCGTTGACGCTACCGATGCTAATGGCGCTGAGTT
GGTCAAAATGTCTTATACCGATAAAAATGGTAAGACAATTGAAGGCGGTT
ATGCGCTTAAAGCTGGCGATAAGTATTACGCCGCAGATTACGATGAAGCG
ACAGGAGCAATTAAAGCTAAAACTACAAGTTATACTGCTGCTGACGGCAC
TACCAAAACAGCGGCTAACCAACTGGGTGGCGTAGACGGTAAAACCGAAG
TCGTTACTATCGACGGTAAAACCTACAATGCCAGCAAAGCCGCTGGTCAT
GATTTCAAAGCACAACCAGAGCTGGCGGAAGCAGCCGCTAAAACCACCGA
AAACCCGCTGCAGAAAATTGATGCCGCGCTGGCGCAGGTGGATGCGCTGC
GCTCTGATCTGGGTGCGGTACAAAACCGTTTCAACTCTGCTATCACCAAC
CTGGGCAATACCGTAAACAATCTGTCTGAAGCGCGTAGCCGTATCGAAGA
TTCCGACTACGCGACCGAAGTTTCCAACATGTCTCGCGCGCAGATTCTGC
AGCAGGCCGGTACTTCCGTTCTGGCGCAGGCTAACCAGGTCCCGCAGAAC
GTGCTGTCTCTGTTACGTTCTGGTAGCGGTTCTGGCTCTAACTCTGAAAA
TGGTATCTGTTACCCGGGTGATTTCATCGATTATGAGGAACTGCGTGAAC
AGCTGTCTAGCGTGAGCTCCTTTGAACGCTTCGAAATCTTCCCGAAGGAA
TCTAGCTGGCCGAACCATAACACGAACGGTGTGACCGCTGCTTGCTCCCA
CGAAGGTAAGAGCTCCTTCTACCGCAATCTGCTGTGGCTGACTGAAAAAG
AAGGTAGCTACCCGAAACTGAAAAATTCTTACGTCAACAAGAAAGGCAAG
GAAGTGCTGGTTCTGTGGGGCATTCACCACCCACCGAACAGCAAAGAGCA
ACAGAACCTGTACCAAAATGAGAACGCTTACGTTTCTGTTGTGACTTCTA
ACTACAATCGTCGCTTTACCCCTGAAATCGCGGAGCGTCCAAAAGTGCGT
GACCAGGCTGGTCGTATGAACTACTATTGGACCCTGCTGAAACCGGGCGA
CACCATTATCTTTGAAGCGAACGGTAACCTGATCGCGCCTATGTACGCGT
TCGCTCTGTCTCGTGGCTAATAA
SEQ ID NO:58 STF2.HA1-3mut PR8
ATGGCACAAGTAATCAACACTAACAGTCTGTCGCTGCTGACCCAGAATAA
CCTGAACAAATCCCAGTCCGCACTGGGCACCGCTATCGAGCGTCTGTCTT
CTGGTCTGCGTATCAACAGCGCGAAAGACGATGCGGCAGGTCAGGCGATT
GCTAACCGTTTCACCGCGAACATCAAAGGTCTGACTCAGGCTTCCCGTAA
CGCTAACGACGGTATCTCCATTGCGCAGACCACTGAAGGCGCGCTGAACG
AAATCAACAACAACCTGCAGCGTGTGCGTGAACTGGCGGTTCAGTCTGCT
AACAGCACCAACTCCCAGTCTGACCTCGACTCCATCCAGGCTGAAATCAC
CCAGCGCCTGAACGAAATCGACCGTGTATCCGGCCAGACTCAGTTCAACG
GCGTGAAAGTCCTGGCGCAGGACAACACCCTGACCATCCAGGTTGGCGCC
AACGACGGTGAAACTATCGATATCGATCTGAAGCAGATCAACTCTCAGAC
CCTGGGTCTGGACTCACTGAACGTGCAGAAAGCGTATGATGTGAAAGATA
CAGCAGTAACAACGAAAGCTTATGCCAATAATGGTACTACACTGGATGTA
TCGGGTCTTGATGATGCAGCTATTAAAGCGGCTACGGGTGGTACGAATGG
TACGGCTTCTGTAACCGGTGGTGCGGTTAAATTTGACGCAGATAATAACA
AGTACTTTGTTACTATTGGTGGCTTTACTGGTGCTGATGCCGCCAAAAAT
GGCGATTATGAAGTTAACGTTGCTACTGACGGTACAGTAACCCTTGCGGC
TGGCGCAACTAAAACCACAATGCCTGCTGGTGCGACAACTAAAACAGAAG
TACAGGAGTTAAAAGATACACCGGCAGTTGTTTCAGCAGATGCTAAAAAT
GCCTTAATTGCTGGCGGCGTTGACGCTACCGATGCTAATGGCGCTGAGTT
GGTCAAAATGTCTTATACCGATAAAAATGGTAAGACAATTGAAGGCGGTT
ATGCGCTTAAAGCTGGCGATAAGTATTACGCCGCAGATTACGATGAAGCG
ACAGGAGCAATTAAAGCTAAAACTACAAGTTATACTGCTGCTGACGGCAC
TACCAAAACAGCGGCTAACCAACTGGGTGGCGTAGACGGTAAAACCGAAG
TCGTTACTATCGACGGTAAAACCTACAATGCCAGCAAAGCCGCTGGTCAT
GATTTCAAAGCACAACCAGAGCTGGCGGAAGCAGCCGCTAAAACCACCGA
AAACCCGCTGCAGAAAATTGATGCCGCGCTGGCGCAGGTGGATGCGCTGC
GCTCTGATCTGGGTGCGGTACAAAACCGTTTCAACTCTGCTATCACCAAC
CTGGGCAATACCGTAAACAATCTGTCTGAAGCGCGTAGCCGTATCGAAGA
TTCCGACTACGCGACCGAAGTTTCCAACATGTCTCGCGCGCAGATTCTGC
AGCAGGCCGGTACTTCCGTTCTGGCGCAGGCTAACCAGGTCCCGCAGAAC
GTGCTGTCTCTGTTACGTAGCGGCAGTGGTAGCGGATCCAACTCTGAAAA
TGAAATCTGTTACCCGGGTGATTTCATCGATAAAGAGGAACTGCGTGAAC
AGCTGTCTAGCGTGAGCTCCTTTGAACGCTTCGAAATCTTCCCGAAGGAA
TCTAGCTGGCCGAACCATAACACGAACGGTGTGACCGCTGCTTGCTCCCA
CGAAGGTAAGAGCTCCTTCTACCGCAATCTGCTGTGGCTGACTGAAAAAG
AAGGTAGCTACCCGAAACTGAAAAATTCTTACGTCAACAAGAAAGGCAAG
GAAGTGCTGGTTCTGTGGGGCATTCACCACCCACCGAACAGCAAAGAGCA
ACAGAACCTGTACCAAAATGAGAACGCTTACGTTTCTGTTGTGACTTCTA
ACTACAATCGTCGCTTTACCCCTGAAATCGCGGAGCGTCCAAAAGTGCGT
GACCAGGCTGGTCGTATGAACTACTATTGGACCCTGCTGAAACCGGGCGA
CACCATTATCTTTGAAGCGAACGGTAACCTGATCGCGCCTATGTACGCGG
CGGCTCTGTCTCGTGGCTAATAA
SEQ ID NO:59 HA1-1 PR8
ATGTCTCATAACGGTAAACTGTGTCGTCTGAAAGGTATTGCACCACTGCA
GCTGGGCAAATGCAACATCGCGGGTTGGCTGCTGGGTAACCCTGAATGTG
ACCCGCTGCTGCCGGTTCGTTCCTGGAGCTACATTGTTGAAACCCCGAAC
TCCGAAAACGGTATCTGCTACCCGGGCGACTTTATTGACTATGAAGAACT
GCGTGAGCAGCTGTCTTCCGTGAGCAGCTTTGAACGCTTCGAAATCTTCC
CGAAGGAAAGCTCCTGGCCGAACCACAACACTAACGGCGTGACGGCGGCT
TGCTCCCACGAAGGCAAATCTTCCTTTTATCGTAACCTGCTGTGGCTGAC
TGAAAAGGAAGGTTCCTACCCAAAACTGAAAAACAGCTATGTTAACAAAA
AGGGTAAAGAAGTCCTGGTGCTGTGGGGCATCCACCACCCGCCGAACTCC
AAGGAACAGCAGAATCTGTATCAGAACGAAAACGCATACGTTTCTGTCGT
TACTTCCAACTATAACCGTCGTTTCACTCCGGAAATCGCGGAACGTCCGA
AAGTACGCGACCAGGCTGGCCGTATGAACTACTACTGGACCCTGCTGAAA
CCGGGTGACACTATTATCTTCGAAGCTAACGGTAACCTGATCGCACCAAT
GTACGCTTTCGCACTGTCTCGTGGTTTCGGTTCCGGCATTATCACCAGCA
ACGCGTCTATGCACGAATGCAACACGAAATGTCAGACGCCGCTGGGCGCA
ATTAATAGCAGCCTGCCGTACCAGAACATCCACCCGGTGACTATCGGCGA
ATGCCCGAAGTATGTTCGT
SEQ ID NO:60 HA1-1.his PR8
ATGTCTCATAACGGTAAACTGTGTCGTCTGAAAGGTATTGCACCACTGCA
GCTGGGCAAATGCAACATCGCGGGTTGGCTGCTGGGTAACCCTGAATGTG
ACCCGCTGCTGCCGGTTCGTTCCTGGAGCTACATTGTTGAAACCCCGAAC
TCCGAAAACGGTATCTGCTACCCGGGCGACTTTATTGACTATGAAGAACT
GCGTGAGCAGCTGTCTTCCGTGAGCAGCTTTGAACGCTTCGAAATCTTCC
CGAAGGAAAGCTCCTGGCCGAACCACAACACTAACGGCGTGACGGCGGCT
TGCTCCCACGAAGGCAATCTTCCTTTTATCGTAACCTGCTGTGGCTGACT
GAAAAAGGAAGGTTCCTACCCAAAACTGAAAAACAGCTATGTTAACAAAA
AGGGTAAAGAAGTCCTGGTGCTGTGGGGCATCCACCACCCGCCGAACTCC
AAGGAACAGCAGAATCTGTATCAGAACGAAAACGCATACGTTTCTGTCGT
TACTTCCAACTATAACCGTCGTTTCACTCCGGAAATCGCGGAACGTCCGA
AAGTACGCGACCAGGCTGGCCGTATGAACTACTACTGGACCCTGCTGAAA
CCGGGTGACACTATTATCTTCGAAGCTAACGGTAACCTGATCGCACCAAT
GTACGCTTTCGCACTGTCTCGTGGTTTCGGTTCCGGCATTATCACCAGCA
ACGCGTCTATGCACGAATGCAACACGAAATGTCAGACGCCGCTGGGCGCA
ATTAATAGCAGCCTGCCGTACCAGAACATCCACCCGGTGACTATCGGCGA
ATGCCCGAAGTATGTTCGTCATCACCATCATCACCAT
SEQ ID NO:61 HA1-2.his PR8
ATGAAAGGTATTGCTCCACTGCAACTGGGTAAATGCAATATTGCGGGTTG
GCTGCTGGGCAACCCGGAATGCGATCCGCTGCTGCCGGTCCGTTCCTGGA
GCTATATTGTTGAAACTCCGAACTCTGAGAACGGCATCTGCTATCCAGGT
GATTTCATTGACTATGAGGAACTGCGTGAACAACTGTCTTCCGTGTCTTC
CTTTGAACGTTTCGAGATTTTTCCTAAAGAATCTTCTTGGCCGAACCATA
ACACTAATGGTGTTACCGCTGCGTGCTCTCATGAAGGTAAATCTAGCTTT
TACCGCAACCTGCTGTGGCTGACCGAGAAAGAAGGTTCTTACCCGAAACT
GAAAAACAGCTACGTAAACAAAAAGGGCAAGGAAGTTCTGGTCCTGTGGG
GTATCCACCATCCGCCGAACAGCAAGGAACAGCAGAATCTGTATCAGAAC
GAAAACGCATACGTATCTGTTGTTACTTCTAACTACAACCGCCGTTTCAC
CCCTGAAATCGCGGAACGTCCGAAAGTGCGTGACCAGGCAGGCCGCATGA
ACTATTACTGGACCCTGCTGAAGCCGGGTGATACTATCATCTTCGAAGCG
AACGGTAACCTGATCGCCCCGATGTACGCGTTCGCTCTGAGCCGTGGCTT
CGGCTCTGGTATCATTACGTCTCATCACCATCATCACCAT
SEQ ID NO:62 CRM.HA1-2
ATGGGTGCTGATGATGTCGTTGATTCCTCCAAAAGCTTCGTTATGGAAAA
TTTCTCTTCTTATCACGGCACCAAACCGGGTTATGTGGATTCTATCCAAA
AAGGCATCCAGAAACCGAAGTCCGGTACGCAGGGTAACTATGATGACGAT
TGGAAAGGTTTTTACTCCACCGATAATAAATATGACGCGGCTGGCTACTC
TGTTGACAACGAAAATCCACTGTCTGGTAAGGCTGGCGGTGTCGTAAAGG
TAACGTATCCTGGCCTGACCAAGGTGCTGGCACTGAAGGTGGATAACGCT
GAAACCATCAAAAAGGAGCTGGGCCTGAGCCTGACTGAACCGCTGATGGA
GCAGGTCGGTACCGAGGAATTCATCAAACGCTTCGGTGATGGCGCCTCCC
GTGTTGTGCTGTCCCTGCCGTTCGCAGAAGGCTCTTCCTCTGTCGAATAT
ATCAACAACTGGGAACAGGCTAAAGCTCTGAGCGTCGAACTGGAAATTAA
CTTTGAGACCCGTGGCAAGCGTGGTCAGGACGCGATGTACGAATATATGG
CTCAGGCTTGTGCCGGTAACCGTGTTCGCCGTTCCGTCGGTTCCTCTCTG
TCTTGCATCAACCTGGATTGGGACGTTATCCGTGATAAGACCAAAACCAA
AATTGAAAGCCTGAAGGAACACGGTCCGATCAAAAACAAAATGTCTGAAT
CTCCGAACAAAACCGTGTCCGAGGAAAAAGCGAAACAGTATCTGGAAGAA
TTCCACCAGACTGCCCTGGAACATCCTGAACTGTCCGAACTGAAGACTGT
AACCGGCACTAACCCGGTGTTCGCAGGCGCAAACTACGCCGCGTGGGCGG
TAAACGTTGCGCAGGTTATTGATAGCGAAACCGCAGATAACCTGGAAAAA
ACGACCGCAGCTCTGTCTATCCTGCCGGGTATCGGTTCCGTTATGGGTAT
TGCGGACGGCGCTGTGCACCACAACACGGAAGAAATCGTCGCACAGTCTA
TCGCGCTGTCTTCTCTGATGGTTGCTCAGGCAATTCCACTGGTAGGTGAA
CTGGTGGACATTGGCTTTGCGGCGTACAACTTCGTCGAAAGCATTATCAA
CCTGTTCCAGGTTGTACACAACTCTTACAACCGTCCGGCCTACAGCCCTG
GCCACAAAACCCAACCGTTTCTGCACGACGGTTATGCGGTGTCCTGGAAC
ACGGTTGAAGACTCTATCATTCGTACCGGCTTTCAGGGCGAGTCCGGCCA
CGATATCAAAATTACTGCAGAAAACACTCCGCTGCCGATCGCTGGCGTTC
TGCTGCCGACCATCCCGGGTAAGCTGGATGTGAACAAAAGCAAAACCCAC
ATCTCTGTTAACGGTCGTAAAATTCGCATGCGCTGTCGTGCTATCGACGG
TGATGTTACCTTCTGCCGTCCGAAATCTCCAGTCTACGTGGGCAACGGTG
TTCATGCCAACCTGCACGTGGCGTTCCATCGTAGCTCTAGCGAAAAAATC
CACTCCAACGAAATCTCTAGCGATTCTATCGGTGTTCTGGGTTATCAGAA
AACGGTGGATCATACGAAAGTCAATTCTAAACTGAGCCTGTTCTTCGAAA
TCAAATCTAGCGGCTCTGGATCCGGTTCCAAAGGCATCGCGCCGCTGCAG
CTGGGTAAATGTAACATTGCGGGCTGGCTGCTGGGTAATCCGGAATGCGA
TCCGCTGCTGCCGGTCCGTAGCTGGTCTTACATTGTTGAAACTCCGAACT
CTGAGAATGGCATCTGCTACCCGGGCGATTTTATCGACTATGAAGAACTG
CGTGAACAGCTGTCTTCCGTTTCTTCCTTTGAACGTTTCGAAATCTTCCC
GAAAGAAAGCAGCTGGCCGAATCACAATACGAACGGTGTTACTGCTGCGT
GTTCTCATGAAGGTAAATCCAGCTTCTACCGTAACCTGCTGTGGCTGACC
GAAAAAGAGGGTTCTTATCCTAAACTGAAAAACAGCTACGTTAACAAAAA
GGGCAAAGAAGTGCTGGTGCTGTGGGGTATCCATCACCCTCCGAACTCTA
AAGAACAACAGAATCTGTATCAGAACGAAAACGCTTACGTTTCCGTGGTG
ACCTCTAACTATAACCGTCGTTTTACCCCGGAGATTGCTGAACGTCCGAA
AGTGCGCGATCAGGCTGGCCGTATGAACTACTATTGGACCCTGCTGAAAC
CGGGCGATACCATCATTTTCGAAGCTAACGGCAACCTGATTGCTCCGATG
TATGCGTTTGCTCTGTCTCGTGGCTTCGGCTCTGGTATTATTACGTCTTA
ATAA
SEQ ID NO:63 LTB.HA1-2
ATGAATAAGGTTAAGTTCTACGTACTGTTTACCGCGCTGCTGTCTTCTCT
GTGCGCGCATGGTGCTCCGCAGTCTATTACTGAACTGTGCTCTGAATACC
ACAACACCCAGATCTATACTATCAACGATAAAATCCTGAGCTATACCGAA
TCTATGGCAGGCAAACGCGAAATGGTTATCATTACCTTTAAAAGCGGCGC
CACCTTTCAAGTGGAAGTTCCGGGCTCTCAGCATATTGACTCTCAAAAAA
AAGCGATCGAACGTATGAAAGATACTCTGCGCATTACCTACCTGACCGAA
ACCAAAATCGATAAACTGTGCGTATGGAACAATAAGACTCCTAACTCTAT
CGCAGCTATTTCTATGGAAAACTCTGGTAGCGGATCCGGTTCTAAAGGCA
TCGCGCCGCTGCAGCTGGGTAAATGTAACATTGCGGGCTGGCTGCTGGGT
AATCCGGAATGCGATCCGCTGCTGCCGGTCCGTAGCTGGTCTTACATTGT
TGAAACTCCGAACTCTGAGAATGGCATCTGCTACCCGGGCGATTTTATCG
ACTATGAAGAACTGCGTGAACAGCTGTCTTCCGTTTCTTCCTTTGAACGT
TTCGAAATCTTCCCGAAAGAAAGCAGCTGGCCGAATCACAATACGAACGG
TGTTACTGCTGCGTGTTCTCATGAAGGTAAATCCAGCTTCTACCGTAACC
TGCTGTGGCTGACCGAAAAAGAGGGTTCTTATCCTAAACTGAAAAACAGC
TACGTTAACAAAAAGGGCAAAGAAGTGCTGGTGCTGTGGGGTATCCATCA
CCCTCCGAACTCTAAAGAACAACAGAATCTGTATCAGAACGAAAACGCTT
ACGTTTCCGTGGTGACCTCTAACTATAACCGTCGTTTTACCCCGGAGATT
GCTGAACGTCCGAAAGTGCGCGATCAGGCTGGCCGTATGAACTACTATTG
GACCCTGCTGAAACCGGGCGATACCATCATTTTCGAAGCTAACGGCAACC
TGATTGCTCCGATGTATGCGTTTGCTCTGTCTCGTGGCTTCGGCTCTGGT
ATTATTACGTCTTAATAA
SEQ ID NO:64 STF2.HA1-1 VN
ATGGCACAAGTAATCAACACTAACAGTCTGTCGCTGCTGACCCAGAATAA
CCTGAACAAATCCCAGTCCGCACTGGGCACCGCTATCGAGCGTCTGTCTT
CTGGTCTGCGTATCAACAGCGCGAAAGACGATGCGGCAGGTCAGGCGATT
GCTAACCGTTTCACCGCGAACATCAAAGGTCTGACTCAGGCTTCCCGTAA
CGCTAACGACGGTATCTCCATTGCGCAGACCACTGAAGGCGCGCTGAACG
AAATCAACAACAACCTGCAGCGTGTGCGTGAACTGGCGGTTCAGTCTGCT
AACAGCACCAACTCCCAGTCTGACCTCGACTCCATCCAGGCTGAAATCAC
CCAGCGCCTGAACGAAATCGACCGTGTATCCGGCCAGACTCAGTTCAACG
GCGTGAAAGTCCTGGCGCAGGACAACACCCTGACCATCCAGGTTGGCGCC
AACGACGGTGAAACTATCGATATCGATCTGAAGCAGATCAACTCTCAGAC
CCTGGGTCTGGACTCACTGAACGTGCAGAAAGCGTATGATGTGAAAGATA
CAGCAGTAACAACGAAAGCTTATGCCAATAATGGTACTACACTGGATGTA
TCGGGTCTTGATGATGCAGCTATTAAAGCGGCTACGGGTGGTACGAATGG
TACGGCTTCTGTAACCGGTGGTGCGGTTAAATTTGACGCAGATAATAACA
AGTACTTTGTTACTATTGGTGGCTTTACTGGTGCTGATGCCGCCAAAAAT
GGCGATTATGAAGTTAACGTTGCTACTGACGGTACAGTAACCCTTGCGGC
TGGCGCAACTAAAACCACAATGCCTGCTGGTGCGACAACTAAAACAGAAG
TACAGGAGTTAAAAGATACACCGGCAGTTGTTTCAGCAGATGCTAAAAAT
GCCTTAATTGCTGGCGGCGTTGACGCTACCGATGCTAATGGCGCTGAGTT
GGTCAAAATGTCTTATACCGATAAAAATGGTAAGACAATTGAAGGCGGTT
ATGCGCTTAAAGCTGGCGATAAGTATTACGCCGCAGATTACGATGAAGCG
ACAGGAGCAATTAAAGCTAAAACCACAAGTTATACTGCTGCTGACGGCAC
TACCAAAACAGCGGCTAACCAACTGGGTGGCGTAGACGGTAAAACCGAAG
TCGTTACTATCGACGGTAAAACCTACAATGCCAGCAAAGCCGCTGGTCAT
GATTTCAAAGCACAACCAGAGCTGGCGGAAGCAGCCGCTAAAACCACCGA
AAACCCGCTGCAGAAAATTGATGCCGCGCTGGCGCAGGTGGATGCGCTGC
GCTCTGATCTGGGTGCGGTACAAAACCGTTTCAACTCTGCTATCACCAAC
CTGGGCAATACCGTAAACAATCTGTCTGAAGCGCGTAGCCGTATCGAAGA
TTCCGACTACGCGACCGAAGTTTCCAACATGTCTCGCGCGCAGATTTTGC
AGCAGGCCGGTACTTCCGTTCTGGCGCAGGCTAACCAGGTCCCGCAGAAC
GTGCTGAGCCTGTTAGCGGAGAAGAAACACAATGGCAAACTGTGTGATCT
GGATGGTGTGAAACCGCTGATTCTGCGCGATTGCTCTGTGGCAGGCTGGC
TGCTGGGCAACCCTATGTGTGACGAATTCATTAACGTTCCGGAATGGTCT
TACATTGTTGAAAAAGCTAACCCTGTCAACGATCTGTGTTACCCTGGTGA
CTTTAACGATTACGAAGAACTGAAGCACCTGCTGTCTCGTATCAATCACT
TCGAGAAAATCCAGATCATCCCGAAATCCTCCTGGAGCTCCCACGAAGCT
TCTCTGGGCGTATCCTCCGCGTGCCCGTACCAGGGCAAATCCTCTTTCTT
TCGTAACGTTGTTTGGCTGATCAAGAAAAACTCCACCTACCCGACGATCA
AGCGTAGCTATAATAACACCAACCAGGAAGACCTGCTGGTTCTGTGGGGC
ATCCACCATCCAAACGATGCTGCGGAACAGACCAAGCTGTACCAGAACCC
GACCACCTACATCAGCGTGGGCACCTCTACGCTGAACCAGCGTCTGGTAC
CGCGTATCGCAACCCGCAGCAAGGTAAACGGTCAAAGCGGCCGCATGGAA
TTTTTCTGGACCATCCTGAAACCGAACGACGCAATCAACTTCGAATCTAA
CGGCAATTTCATCGCTCCGGAGTATGCGTACAAAATCGTAAAGAAAGGTG
ATAGCACTATCATGAAATCCGAGCTGGAATATGGCAACTGTAACACCAAA
TGCCAGACCCCGATGGGTGCAATCAACTCCTCCATGCCGTTTCACAACAT
TCACCCGCTGACTATCGGCGAATGTCCGAAATACGTTAAATAGTAA
SEQ ID NO:65 FOR PRIMER
AGTGGCTGAGCCTGTTAGCGGAGAAGAAACACAATGGCAAACTGTG
SEQ ID NO:66 REV PRIMER
AGTCGCTCAGCTTACTATTTAACGTATTTCGGACATTCGCCGATAGTCAG
SEQ ID NO:67 HA0s VN
GTGCTGAGCCTGTTACGTCAGATTTGTATCGGCTACCACGCAAACAACTC
TACCGAGCAAGTTGATACCATCATGGAGAAAAACGTGACCGTTACTCACG
CGCAGGACATCCTGGAGAAGAAACACAATGGCAAACTGTGTGATCTGGAT
GGTGTGAAACCGCTGATTCTGCGCGATTGCTCTGTGGCAGGCTGGCTGCT
GGGCAACCCTATGTGTGACGAATTCATTAACGTTCCGGAATGGTCTTACA
TTGTTGAAAAAGCTAACCCTGTCAACGATCTGTGTTACCCTGGTGACTTT
AACGATTACGAAGAACTGAAGCACCTGCTGTCTCGTATCAATCACTTCGA
GAAAATCCAGATCATCCCGAAATCCTCCTGGAGCTCCCACGAAGCTTCTC
TGGGCGTATCCTCCGCGTGCCCGTACCAGGGCAAATCCTCTTTCTTTCGT
AACGTTGTTTGGCTGATCAAGAAAAACTCCACCTACCCGACGATCAAGCG
TAGCTATAATAACACCAACCAGGAAGACCTGCTGGTTCTGTGGGGCATCC
ACCATCCAAACGATGCTGCGGAACAGACCAAGCTGTACCAGAACCCGACC
ACCTACATCAGCGTGGGCACCTCTACGCTGAACCAGCGTCTGGTACCGCG
TATCGCAACCCGCAGCAAGGTAAACGGTCAAAGCGGCCGCATGGAATTTT
TCTGGACCATCCTGAAACCGAACGACGCAATCAACTTCGAATCTAACGGC
AATTTCATCGCTCCGGAGTATGCGTACAAAATCGTAAAGAAAGGTGATAG
CACTATCATGAAATCCGAGCTGGAATATGGCAACTGTAACACCAAATGCC
AGACCCCGATGGGTGCAATCAACTCCTCCATGCCGTTTCACAACATTCAC
CCGCTGACTATCGGCGAATGTCCGAAATACGTTAAATCCAATCGTCTGGT
TCTGGCTACCGGTCTGCGTAACTCCCCACAGCGTGAACGTCGTCGTAAGA
AACGTGGTCTGTTTGGCGCGATCGCTGGTTTCATCGAGGGCGGCTGGCAG
GGTATGGTTGATGGCTGGTACGGTTATCATCATTCCAATGAACAGGGTTC
CGGCTACGCCGCAGATAAAGAAAGCACTCAGAAAGCAATTGATGGCGTAA
CTAACAAAGTAAATTCTATCATTGATAAAATGAACACCCAGTTCGAGGCG
GTTGGTCGTGAGTTCAACAACCTGGAACGCCGTATCGAAAACCTGAACAA
GAAAATGGAAGACGGTTTTCTGGATGTGTGGACTTACAATGCTGAACTGC
TGGTGCTGATGGAAAACGAGCGTACCCTGGACTTCCACGACAGCAACGTC
AAAAATCTGTATGACAAAGTCCGTCTGCAGCTGCGTGATAACGCTAAAGA
GCTGGGTAATGGCTGCTTCGAGTTCTATCACAAATGCGACAACGAATGCA
TGGAATCTGTCCGCAACGGCACTTACGATTATCCGCAGTACTCCGAAGAA
GCGCGCCTGAAACGCGAAGAGATCTCCGGTGTGAAGCTGGAGTCTATTGG
CATCTACCAGATCCTGTCCATCTACAGCACCTAGTAAGCTGAGCGCCTAC
GCAGC
SEQ ID NO:68 STF2.HA1-2 VN
ATGGCACAAGTAATCAACACTAACAGTCTGTCGCTGCTGACCCAGAATAA
CCTGAACAAATCCCAGTCCGCACTGGGCACCGCTATCGAGCGTCTGTCTT
CTGGTCTGCGTATCAACAGCGCGAAAGACGATGCGGCAGGTCAGGCGATT
GCTAACCGTTTCACCGCGAACATCAAAGGTCTGACTCAGGCTTCCCGTAA
CGCTAACGACGGTATCTCCATTGCGCAGACCACTGAAGGCGCGCTGAACG
AAATCAACAACAACCTGCAGCGTGTGCGTGAACTGGCGGTTCAGTCTGCT
AACAGCACCAACTCCCAGTCTGACCTCGACTCCATCCAGGCTGAAATCAC
CCAGCGCCTGAACGAAATCGACCGTGTATCCGGCCAGACTCAGTTCAACG
GCGTGAAAGTCCTGGCGCAGGACAACACCCTGACCATCCAGGTTGGCGCC
AACGACGGTGAAACTATCGATATCGATCTGAAGCAGATCAACTCTCAGAC
CCTGGGTCTGGACTCACTGAACGTGCAGAAAGCGTATGATGTGAAAGATA
CAGCAGTAACAACGAAAGCTTATGCCAATAATGGTACTACACTGGATGTA
TCGGGTCTTGATGATGCAGCTATTAAAGCGGCTACGGGTGGTACGAATGG
TACGGCTTCTGTAACCGGTGGTGCGGTTAAATTTGACGCAGATAATAACA
AGTACTTTGTTACTATTGGTGGCTTTACTGGTGCTGATGCCGCCAAAAAT
GGCGATTATGAAGTTAACGTTGCTACTGACGGTACAGTAACCCTTGCGGC
TGGCGCAACTAAAACCACAATGCCTGCTGGTGCGACAACTAAAACAGAAG
TACAGGAGTTAAAAGATACACCGGCAGTTGTTTCAGCAGATGCTAAAAAT
GCCTTAATTGCTGGCGGCGTTGACGCTACCGATGCTAATGGCGCTGAGTT
GGTCAAAATGTCTTATACCGATAAAAATGGTAAGACAATTGAAGGCGGTT
ATGCGCTTAAAGCTGGCGATAAGTATTACGCCGCAGATTACGATGAAGCG
ACAGGAGCAATTAAAGCTAAAACCACAAGTTATACTGCTGCTGACGGCAC
TACCAAAACAGCGGCTAACCAACTGGGTGGCGTAGACGGTAAAACCGAAG
TCGTTACTATCGACGGTAAAACCTACAATGCCAGCAAAGCCGCTGGTCAT
GATTTCAAAGCACAACCAGAGCTGGCGGAAGCAGCCGCTAAAACCACCGA
AAACCCGCTGCAGAAAATTGATGCCGCGCTGGCGCAGGTGGATGCGCTGC
GCTCTGATCTGGGTGCGGTACAAAACCGTTTCAACTCTGCTATCACCAAC
CTGGGCAATACCGTAAACAATCTGTCTGAAGCGCGTAGCCGTATCGAAGA
TTCCGACTACGCGACCGAAGTTTCCAACATGTCTCGCGCGCAGATTTTGC
AGCAGGCCGGTACTTCCGTTCTGGCGCAGGCTAACCAGGTCCCGCAGAAC
GTGCTGAGCCTGTTAGCAGGTGTGAAACCGCTGATTCTGCGCGATTGCTC
TGTGGCAGGCTGGCTGCTGGGCAACCCTATGTGTGACGAATTCATTAACG
TTCCGGAATGGTCTTACATTGTTGAAAAAGCTAACCCTGTCAACGATCTG
TGTTACCCTGGTGACTTTAACGATTACGAAGAACTGAAGCACCTGCTGTC
TCGTATCAATCACTTCGAGALAATCCAGATCATCCCGAAATCCTCCTGGA
GCTCCCACGAAGCTTCTCTGGGCGTATCCTCCGCGTGCCCGTACCAGGGC
AAATCCTCTTTCTTTCGTAACGTTGTTTGGCTGATCAAGAAAAACTCCAC
CTACCCGACGATCAAGCGTAGCTATAATAACACCAACCAGGAAGACCTGC
TGGTTCTGTGGGGCATCCACCATCCAAACGATGCTGCGGAACAGACCAAG
CTGTACCAGAACCCGACCACCTACATCAGCGTGGGCACCTCTACGCTGAA
CCAGCGTCTGGTACCGCGTATCGCAACCCGCAGCAAGGTAAACGGTCAAG
CGGCCGCATGGAATTTTTCTGGACCATCCTGAAACCGAACGAACGCAATC
AACTTCGAATCTAACGGCAATTTCATCGCTCCGGAGTATGCGTACAAAAT
CGTAAAGAAAGGTGATAGCACTATCATGAAATCCGAGTAGTAA
SEQ ID NO:69 FOR PRIMER
AGTCGCTGAGCCTGTTAGCAGGTGTGAAACCGCTGATTCTGCGCGATTG
SEQ ID NO:70 REV PRIMER
TGACGCTCAGCTTACTACTCGGATTTCATGATAGTGCTATCACCTTTC
SEQ ID NO:71 STF2.HA1-2mut VN
ATGGCACAAGTAATCAACACTAACAGTCTGTCGCTGCTGACCCAGAATAA
CCTGAACAAATCCCAGTCCGCACTGGGCACCGCTATCGAGCGTCTGTCTT
CTGGTCTGCGTATCAACAGCGCGAAAGACGATGCGGCAGGTCAGGCGATT
GCTAACCGTTTCACCGCGAACATCAAAGGTCTGACTCAGGCTTCCCGTAA
CGCTAACGACGGTATCTCCATTGCGCAGACCACTGAAGGCGCGCTGAACG
AAATCAACAACAACCTGCAGCGTGTGCGTGAACTGGCGGTTCAGTCTGCT
AACAGCACCAACTCCCAGTCTGACCTCGACTCCATCCAGGCTGAAATCAC
CCAGCGCCTGAACGAAATCGACCGTGTATCCGGCCAGACTCAGTTCAACG
GCGTGAAAGTCCTGGCGCAGGACAACACCCTGACCATCCAGGTTGGCGCC
AACGACGGTGAAACTATCGATATCGATCTGAAGCAGATCAACTCTCAGAC
CCTGGGTCTGGACTCACTGAACGTGCAGAAAGCGTATGATGTGAAAGATA
CAGCAGTAACAACGAAAGCTTATGCCAATAATGGTACTACACTGGATGTA
TCGGGTCTTGATGATGCAGCTATTAAAGCGGCTACGGGTGGTACGAATGG
TACGGCTTCTGTAACCGGTGGTGCGGTTAAATTTGACGCAGATAATAACA
AGTACTTTGTTACTATTGGTGGCTTTACTGGTGCTGATGCCGCCAAAAAT
GGCGATTATGAAGTTAACGTTGCTACTGACGGTACAGTAACCCTTGCGGC
TGGCGCAACTAAAACCACAATGCCTGCTGGTGCGACAACTAAAACAGAAG
TACAGGAGTTAAAAGATACACCGGCAGTTGTTTCAGCAGATGCTAAAAAT
GCCTTAATTGCTGGCGGCGTTGACGCTACCGATGCTAATGGCGCTGAGTT
GGTCAAAATGTCTTATACCGATAAAAATGGTAAGACAATTGAAGGCGGTT
ATGCGCTTAAAGCTGGCGATAAGTATTACGCCGCAGATTACGATGAAGCG
ACAGGAGCAATTAAAGCTAAAACCACAAGTTATACTGCTGCTGACGGCAC
TACCAAAACAGCGGCTAACCAACTGGGTGGCGTAGACGGTAAAACCGAAG
TCGTTACTATCGACGGTAAAACCTACAATGCCAGCAAAGCCGCTGGTCAT
GATTTCAAAGCACAACCAGAGCTGGCGGAAGCAGCCGCTAAAACCACCGA
AAACCCGCTGCAGAAAATTGATGCCGCGCTGGCGCAGGTGGATGCGCTGC
GCTCTGATCTGGGTGCGGTACAAAACCGTTTCAACTCTGCTATCACCAAC
CTGGGCAATACCGTAAACAATCTGTCTGAAGCGCGTAGCCGTATCGAAGA
TTCCGACTACGCGACCGAAGTTTCCAACATGTCTCGCGCGCAGATTTTGC
AGCAGGCCGGTACTTCCGTTCTGGCGCAGGCTAACCAGGTCCCGCAGAAC
GTGCTGAGCCTGTTAGCGGGTGCGAAACCGCTGTCTCTGCGCGATTGCTC
TGTGGCAGGCTGGCTGCTGGGCAACCCTATGTGTGACGAATTCATTAACG
TTCCGGAATGGTCTGATATTGCCGAAAAAGCTAACCCTGTCAACGATCTG
TGTTACCCTGGTGACTTTAACGATTACGAAGAACTGAAGCACCTGCTGTC
TCGTATCAATCACTTCGAGAAAATCCAGATCATCCCGAAATCCTCCTGGA
GCTCCCACGAAGCTTCTCTGGGCGTATCCTCCGCGTGCCCGTACCAGGGC
AAATCCTCTTTCTTTCGTAACGTTGTTTGGCTGATCAAGAAAAACTCCAC
CTACCCGACGATCAAGCGTAGCTATAATAACACCAACCAGGAAGACCTGC
TGGTTCTGTGGGGCATCCACCATCCAAACGATGCTGCGGAACAGACCAAG
CTGTACCAGAACCCGACCACCTACATCAGCGTGGGCACCTCTACGCTGAA
CCAGCGTCTGGTACCGCGTATCGCAACCCGCAGCAAGGTAAACGGTCAAA
GCGGCCGCATGGAATTTTTCTGGACCATCCTGAAACCGAACGACGCAATC
AACTTCGAATCTAACGGCAATTTCATCGCTCCGGAGTATGCGTACAAAAT
CGTAAAGAAAGGTGATAGCACTATCATGAAATCCGAGTAGTAA
SEQ ID NO:72 HA1-2mut VN
GGTGCGAAACCGCTGTCTCTGCGCGATTGCTCTGTGGCAGGCTGGCTGCT
GGGCAACCCTATGTGTGACGAATTCATTAACGTTCCGGAATGGTCTGATA
TTGCCGAAAAAGCTAACCCTGTCAACGATCTGTGTTACCCTGGTGACTTT
AACGATTACGAAGAACTGAAGCACCTGCTGTCTCGTATCAATCACTTCGA
GAAAATCCAGATCATCCCGAAATCCTCCTGGAGCTCCCACGAAGCTTCTC
TGGGCGTATCCTCCGCGTGCCCGTACCAGGGCAAATCCTCTTTCTTTCGT
AACGTTGTTTGGCTGATCAAGAAAAACTCCACCTACCCGACGATCAAGCG
TAGCTATAATAACACCAACCAGGAAGACCTGCTGGTTCTGTGGGGCATCC
ACCATCCAAACGATGCTGCGGAACAGACCAAGCTGTACCAGAACCCGACC
ACCTACATCAGCGTGGGCACCTCTACGCTGAACCAGCGTCTGGTACCGCG
TATCGCAACCCGCAGCAAGGTAAACGGTCAAAGCGGCCGCATGGAATTTT
TCTGGACCATCCTGAAACCGAACGACGCAATCAACTTCGAATCTAACGGC
AATTTCATCGCTCCGGAGTATGCGTACAAAATCGTAAAGAAAGGTGATAG
CACTATCATGAAATCCGAGTAGTAA
SEQ ID NO:73 STF2.HA1-1 IND
ATGGCACAAGTAATCAACACTAACAGTCTGTCGCTGCTGACCCAGAATAA
CCTGAACAAATCCCAGTCCGCACTGGGCACCGCTATCGAGCGTCTGTCTT
CTGGTCTGCGTATCAACAGCGCGAAAGACGATGCGGCAGGTCAGGCGATT
GCTAACCGTTTCACCGCGAACATCAAAGGTCTGACTCAGGCTTCCCGTAA
CGCTAACGACGGTATCTCCATTGCGCAGACCACTGAAGGCGCGCTGAACG
AAATCAACAACAACCTGCAGCGTGTGCGTGAACTGGCGGTTCAGTCTGCT
AACAGCACCAACTCCCAGTCTGACCTCGACTCCATCCAGGCTGAAATCAC
CCAGCGCCTGAACGAAATCGACCGTGTATCCGGCCAGACTCAGTTCAACG
GCGTGAAAGTCCTGGCGCAGGACAACACCCTGACCATCCAGGTTGGCGCC
AACGACGGTGAAACTATCGATATCGATCTGAAGCAGATCAACTCTCAGAC
CCTGGGTCTGGACTCACTGAACGTGCAGAAAGCGTATGATGTGAAAGATA
CAGCAGTAACAACGAAAGCTTATGCCAATAATGGTACTACACTGGATGTA
TCGGGTCTTGATGATGCAGCTATTAAAGCGGCTACGGGTGGTACGAATGG
TACGGCTTCTGTAACCGGTGGTGCGGTTAAATTTGACGCAGATAATAACA
AGTACTTTGTTACTATTGGTGGCTTTACTGGTGCTGATGCCGCCAAAAAT
GGCGATTATGAAGTTAACGTTGCTACTGACGGTACAGTAACCCTTGCGGC
TGGCGCAACTAAAACCACAATGCCTGCTGGTGCGACAACTAAAACAGAAG
TACAGGAGTTAAAAGATACACCGGCAGTTGTTTCAGCAGATGCTAAAAAT
GCCTTAATTGCTGGCGGCGTTGACGCTACCGATGCTAATGGCGCTGAGTT
GGTCAAAATGTCTTATACCGATAAAAATGGTAAGACAATTGAAGGCGGTT
ATGCGCTTAAAGCTGGCGATAAGTATTACGCCGCAGATTACGATGAAGCG
ACAGGAGCAATTAAAGCTAAAACCACAAGTTATACTGCTGCTGACGGCAC
TACCAAAACAGCGGCTAACCAACTGGGTGGCGTAGACGGTAAAACCGAAG
TCGTTACTATCGACGGTAAAACCTACAATGCCAGCAAAGCCGCTGGTCAT
GATTTCAAAGCACAACCAGAGCTGGCGGAAGCAGCCGCTAAAACCACCGA
AAACCCGCTGCAGAAAATTGATGCCGCGCTGGCGCAGGTGGATGCGCTGC
GCTCTGATCTGGGTGCGGTACAAAACCGTTTCAACTCTGCTATCACCAAC
CTGGGCAATACCGTAAACAATCTGTCTGAAGCGCGTAGCCGTATCGAAGA
TTCCGACTACGCGACCGAAGTTTCCAACATGTCTCGCGCGCAGATTTTGC
AGCAGGCCGGTACTTCCGTTCTGGCGCAGGCTAACCAGGTCCCGCAGAAC
GTGCTGTCTCTGTTAGCGGAGAAAACGCATAACGGTAAACTGTGCGACCT
GGACGGCGTGAAGCCGCTGATCCTGCGTGACTGTTCTGTTGCTGGCTGGC
TGCTGGGCAACCCGATGTGCGATGAGTTCATCAACGTTCCGGAGTGGTCT
TATATTGTTGAAAAAGCGAACCCGACCAATGACCTGTGCTACCCGGGCTC
TTTTAATGACTACGAGGAGCTGAAACATCTGCTGTCTCGCATCAACCATT
TCGAAAAAATTCAGATCATCCCGAAATCTTCCTGGAGCGATCACGAAGCT
TCTTCCGGCGTATCTTCTGCATGCCCTTACCTGGGTTCCCCGTCTTTCTT
CCGTAACGTGGTTTGGCTGATCAAGAAGAACTCTACGTACCCGACCATCA
AGAAATCCTATAACAACACTAACCAGGAAGATCTGCTGGTGCTGTGGGGT
ATCCATCATCCAAACGATGCAGCCGAACAGACCCGCCTGTACCAGAATCC
GACCACGTACATCTCTATCGGCACTTCTACCCTGAATCAACGCCTGGTGC
CGAAAATCGCAACTCGCAGCAAAGTCAACGGCCAATCTGGTCGCATGGAG
TTTTTCTGGACCATCCTGAAACCGAACGACGCGATTAACTTCGAAAGCAA
CGGCAACTTCATTGCACCGGAATATGCTTACAAGATCGTTAAAAAGGGTG
ATTCTGCGATCATGAAAAGCGAGCTGGAATACGGCAACTGCAACACTAAA
TGCCAGACCCCGATGGGTGCAATCAATTCCAGCATGCCATTTCACAACAT
CCACCCGCTGACCATCGGCGAGTGTCCAAAATACGTTAAATAATAG
SEQ ID NO:74 FOR PRIMER
AGTGGCTGAGCCTGTTAGCGGAGAAAACGCATAACGGTAAACTGTG
SEQ ID NO:75 HA0s IND
GCTGAGCCTGTTACGTGATCAAATCTGCATCGGTTACCACGCAAACAACT
CCACTGAACAAGTGGATACGATCATGGAAAAGAACGTGACCGTGACCCAC
GCTCAAGATATCCTGGAGAAAACGCATAACGGTAAACTGTGCGACCTGGA
CGGCGTGAAGCCGCTGATCCTGCGTGACTGTTCTGTTGCTGGCTGGCTGC
TGGGCAACCCGATGTGCGATGAGTTCATCAACGTTCCGGAGTGGTCTTAT
ATTGTTGAAAAAGCGAACCCGACCAATGACCTGTGCTACCCGGGCTCTTT
TAATGACTACGAGGAGCTGAAACATCTGCTGTCTCGCATCAACCATTTCG
AAAAAATTCAGATCATCCCGAAATCTTCCTGGAGCGATCACGAAGCTTCT
TCCGGCGTATCTTCTGCATGCCCTTACCTGGGTTCCCCGTCTTTCTTCCG
TAACGTGGTTTGGCTGATCAAGAAGAACTCTACGTACCCGACCATCAAGA
AATCCTATAACAACACTAACCAGGAAGATCTGCTGGTGCTGTGGGGTATC
CATCATCCAAACGATGCAGCCGAACAGACCCGCCTGTACCAGAATCCGAC
CACGTACATCTCTATCGGCACTTCTACCCTGAATCAACGCCTGGTGCCGA
AAATCGCAACTCGCAGCAAAGTCAACGGCCAATCTGGTCGCATGGAGTTT
TTCTGGACCATCCTGAAACCGAACGACGCGATTAACTTCGAAAGCAACGG
CAACTTCATTGCACCGGAATATGCTTACAAGATCGTTAAAAAGGGTGATT
CTGCGATCATGAAAAGCGAGCTGGAATACGGCAACTGCAACACTAAATGC
CAGACCCCGATGGGTGCAATCAATTCCAGCATGCCATTTCACAACATCCA
CCCGCTGACCATCGGCGAGTGTCCAAAATACGTTAAATCCAATCGTCTGG
TGCTGGCAACGGGCCTGCGCAACTCTCCGCAACGTGAGTCTCGTCGCAAA
AAGCGTGGCCTGTTTGGCGCAATTGCGGGCTTCATCGAGGGCGGCTGGCA
GGGTATGGTTGATGGTTGGTACGGTTATCACCATTCCAACGAGCAGGGCT
CTGGTTACGCTGCGGACAAAGAGTCCACGCAGAAAGCGATCGATGGCGTC
ACCAACAAAGTGAACTCTATCATCGACAAGATGAACACTCAGTTCGAGGC
TGTGGGCCGTGAATTCAACAATCTGGAACGTCGCATCGAAAACCTGAACA
AAAAGATGGAAGACGGTTTCCTGGACGTATGGACCTATAACGCAGAGCTG
CTGGTTCTGATGGAAAACGAACGTACTCTGGACTTCCACGATTCTAACGT
TAAAAACCTGTACGACAAAGTTCGTCTGCAGCTGCGCGATAATGCAAAAG
AACTGGGTAACGGCTGCTTTGAATTTTACCACAAATGTGACAACGAATGC
ATGGAAAGCATCCGTAACGGTACCTACAATTACCCACAGTACTCCGAAGA
AGCGCGTCTGAAACGTGAAGAAATCTCCGGTGTAAAACTGGAATCCATTG
GCACGTATCAGATTCTGTCTATCTACTCCACGGTAGCGTCCTCTCTGGCG
CTGGCAATTATGATGGCCGGCCTGTCTCTGTGGATGTGCTCTAACGGCTC
TCTGCAGTGCCGCATCTGCATCTAATAGGCTGAGC
SEQ ID NO:76 STF2.HA1-2 IND
ATGGCACAAGTAATCAACACTAACAGTCTGTCGCTGCTGACCCAGAATAA
CCTGAACAAATCCCAGTCCGCACTGGGCACCGCTATCGAGCGTCTGTCTT
CTGGTCTGCGTATCAACAGCGCGAAAGACGATGCGGCAGGTCAGGCGATT
GCTAACCGTTTCACCGCGAACATCAAAGGTCTGACTCAGGCTTCCCGTAA
CGCTAACGACGGTATCTCCATTGCGCAGACCACTGAAGGCGCGCTGAACG
AAATCAACAACAACCTGCAGCGTGTGCGTGAACTGGCGGTTCAGTCTGCT
AACAGCACCAACTCCCAGTCTGACCTCGACTCCATCCAGGCTGAAATCAC
CCAGCGCCTGAACGAAATCGACCGTGTATCCGGCCAGACTCAGTTCAACG
GCGTGAAAGTCCTGGCGCAGGACAACACCCTGACCATCCAGGTTGGCGCC
AACGACGGTGAAACTATCGATATCGATCTGAAGCAGATCAACTCTCAGAC
CCTGGGTCTGGACTCACTGAACGTGCAGAAAGCGTATGATGTGAAAGATA
CAGCAGTAACAACGAAAGCTTATGCCAATAATGGTACTACACTGGATGTA
TCGGGTCTTGATGATGCAGCTATTAAAGCGGCTACGGGTGGTACGAATGG
TACGGCTTCTGTAACCGGTGGTGCGGTTAAATTTGACGCAGATAATAACA
AGTACTTTGTTACTATTGGTGGCTTTACTGGTGCTGATGCCGCCAAAAAT
GGCGATTATGAAGTTAACGTTGCTACTGACGGTACAGTAACCCTTGCGGC
TGGCGCAACTAAAACCACAATGCCTGCTGGTGCGACAACTAAAACAGAAG
TACAGGAGTTAAAAGATACACCGGCAGTTGTTTCAGCAGATGCTAAAAAT
GCCTTAATTGCTGGCGGCGTTGACGCTACCGATGCTAATGGCGCTGAGTT
GGTCAAAATGTCTTATACCGATAAAAATGGTAAGACAATTGAAGGCGGTT
ATGCGCTTAAAGCTGGCGATAAGTATTACGCCGCAGATTACGATGAAGCG
ACAGGAGCAATTAAAGCTAAAACCACAAGTTATACTGCTGCTGACGGCAC
TACCAAAACAGCGGCTAACCAACTGGGTGGCGTAGACGGTAAAACCGAAG
TCGTTACTATCGACGGTAAAACCTACAATGCCAGCAAAGCCGCTGGTCAT
GATTTCAAAGCACAACCAGAGCTGGCGGAAGCAGCCGCTAAAACCACCGA
AAACCCGCTGCAGAAAATTGATGCCGCGCTGGCGCAGGTGGATGCGCTGC
GCTCTGATCTGGGTGCGGTACAAAACCGTTTCAACTCTGCTATCACCAAC
CTGGGCAATACCGTAAACAATCTGTCTGAAGCGCGTAGCCGTATCGAAGA
TTCCGACTACGCGACCGAAGTTTCCAACATGTCTCGCGCGCAGATTTTGC
AGCAGGCCGGTACTTCCGTTCTGGCGCAGGCTAACCAGGTCCCGCAGAAC
GTGCTGAGCCTGTTAGCAGGTGTGAAACCGCTGATTCTGCGCGATTGTTC
TGTTGCTGGCTGGCTGCTGGGCAACCCGATGTGCGATGAGTTCATCAACG
TTCCGGAGTGGTCTTATATTGTTGAAAAAGCGAACCCGACCAATGACCTG
TGCTACCCGGGCTCTTTTAATGACTACGAGGAGCTGAAACATCTGCTGTC
TCGCATCAACCATTTCGAAAAAATTCAGATCATCCCGAAATCTTCCTGGA
GCGATCACGAAGCTTCTTCCGGCGTATCTTCTGCATGCCCTTACCTGGGT
TCCCCGTCTTTCTTCCGTAACGTGGTTTGGCTGATCAAGAAGAACTCTAC
GTACCCGACCATCAAGAAATCCTATAACAACACTAACCAGGAAGATCTGC
TGGTGCTGTGGGGTATCCATCATCCAAACGATGCAGCCGAACAGACCCGC
CTGTACCAGAATCCGACCACGTACATCTCTATCGGCACTTCTACCCTGAA
TCAACGCCTGGTGCCGAAAATCGCAACTCGCAGCAAAGTCAACGGCCAAT
CTGGTCGCATGGAGTTTTTCTGGACCATCCTGAAACCGAACGACGCGATT
AACTTCGAAAGCAACGGCAACTTCATTGCACCGGAATATGCTTACAAGAT
CGTTAAAAAGGGTGATTCTGCGATCATGAAAAGCGAGTAATAG
SEQ ID NO:77 REV PRIMER
AGTCGCTCAGCCTATTACTCGCTTTTCATGATCGCAGAATCAC
SEQ ID NO:78 STF2.HA1-2mut IND
ATGGCACAAGTAATCAACACTAACAGTCTGTCGCTGCTGACCCAGAATAA
CCTGAACAAATCCCAGTCCGCACTGGGCACCGCTATCGAGCGTCTGTCTT
CTGGTCTGCGTATCAACAGCGCGAAAGACGATGCGGCAGGTCAGGCGATT
GCTAACCGTTTCACCGCGAACATCAAAGGTCTGACTCAGGCTTCCCGTAA
CGCTAACGACGGTATCTCCATTGCGCAGACCACTGAAGGCGCGCTGAACG
AAATCAACAACAACCTGCAGCGTGTGCGTGAACTGGCGGTTCAGTCTGCT
AACAGCACCAACTCCCAGTCTGACCTCGACTCCATCCAGGCTGAAATCAC
CCAGCGCCTGAACGAAATCGACCGTGTATCCGGCCAGACTCAGTTCAACG
GCGTGAAAGTCCTGGCGCAGGACAACACCCTGACCATCCAGGTTGGCGCC
AACGACGGTGAAACTATCGATATCGATCTGAAGCAGATCAACTCTCAGAC
CCTGGGTCTGGACTCACTGAACGTGCAGAAAGCGTATGATGTGAAAGATA
CAGCAGTAACAACGAAAGCTTATGCCAATAATGGTACTACACTGGATGTA
TCGGGTCTTGATGATGCAGCTATTAAAGCGGCTACGGGTGGTACGAATGG
TACGGCTTCTGTAACCGGTGGTGCGGTTAAATTTGACGCAGATAATAACA
AGTACTTTGTTACTATTGGTGGCTTTACTGGTGCTGATGCCGCCAAAAAT
GGCGATTATGAAGTTAACGTTGCTACTGACGGTACAGTAACCCTTGCGGC
TGGCGCAACTAAAACCACAATGCCTGCTGGTGCGACAACTAAAACAGAAG
TACAGGAGTTAAAAGATACACCGGCAGTTGTTTCAGCAGATGCTAAAAAT
GCCTTAATTGCTGGCGGCGTTGACGCTACCGATGCTAATGGCGCTGAGTT
GGTCAAAATGTCTTATACCGATAAAAATGGTAAGACAATTGAAGGCGGTT
ATGCGCTTAAAGCTGGCGATAAGTATTACGCCGCAGATTACGATGAAGCG
ACAGGAGCAATTAAAGCTAAAACCACAAGTTATACTGCTGCTGACGGCAC
TACCAAAACAGCGGCTAACCAACTGGGTGGCGTAGACGGTAAAACCGAAG
TCGTTACTATCGACGGTAAAACCTACAATGCCAGCAAAGCCGCTGGTCAT
GATTTCAAAGCACAACCAGAGCTGGCGGAAGCAGCCGCTAAAACCACCGA
AAACCCGCTGCAGAAAATTGATGCCGCGCTGGCGCAGGTGGATGCGCTGC
GCTCTGATCTGGGTGCGGTACAAAACCGTTTCAACTCTGCTATCACCAAC
CTGGGCAATACCGTAAACAATCTGTCTGAAGCGCGTAGCCGTATCGAAGA
TTCCGACTACGCGACCGAAGTTTCCAACATGTCTCGCGCGCAGATTTTGC
AGCAGGCCGGTACTTCCGTTCTGGCGCAGGCTAACCAGGTCCCGCAGAAC
GTGCTGTCTCTGTTAGCGGGCGCAAAGCCGCTGTCTCTGCGTGACTGTTC
TGTTGCTGGCTGGCTGCTGGGCAACCCGATGTGCGATGAGTTCATCAACG
TTCCGGAGTGGTCTGATATTGCGGAAAAAGCGAACCCGACCAATGACCTG
TGCTACCCGGGCTCTTTTAATGACTACGAGGAGCTGAAACATCTGCTGTC
TCGCATCAACCATTTCGAAAAAATTCAGATCATCCCGAAATCTTCCTGGA
GCGATCACGAAGCTTCTTCCGGCGTATCTTCTGCATGCCCTTACCTGGGT
TCCCCGTCTTTCTTCCGTAACGTGGTTTGGCTGATCAAGAAGAACTCTAC
GTACCCGACCATCAAGAAATCCTATAACAACACTAACCAGGAAGATCTGC
TGGTGCTGTGGGGTATCCATCATCCAAACGATGCAGCCGAACAGACCCGC
CTGTACCAGAATCCGACCACGTACATCTCTATCGGCACTTCTACCCTGAA
TCAACGCCTGGTGCCGAAAATCGCAACTCGCAGCAAAGTCAACGGCCAAT
CTGGTCGCATGGAGTTTTTCTGGACCATCCTGAAACCGAACGACGCGATT
AACTTCGAAAGCAACGGCAACTTCATTGCACCGGAATATGCTTACAAGAT
CGTTAAAAAGGGTGATTCTGCGATCATGAAAAGCGAGTAATAG
SEQ ID 79 HA1-2mut IND
GGCGCAAAGCCGCTGTCTCTGCGTGACTGTTCTGTTGCTGGCTGGCTGCT
GGGCAACCCGATGTGCGATGAGTTCATCAACGTTCCGGAGTGGTCTGATA
TTGCGGAAAAAGCGAACCCGACCAATGACCTGTGCTACCCGGGCTCTTTT
AATGACTACGAGGAGCTGAAACATCTGCTGTCTCGCATCAACCATTTCGA
AAAAATTCAGATCATCCCGAAATCTTCCTGGAGCGATCACGAAGCTTCTT
CCGGCGTATCTTCTGCATGCCCTTACCTGGGTTCCCCGTCTTTCTTCCGT
AACGTGGTTTGGCTGATCAAGAAGAACTCTACGTACCCGACCATCAAGAA
ATCCTATAACAACACTAACCAGGAAGATCTGCTGGTGCTGTGGGGTATCC
ATCATCCAAACGATGCAGCCGAACAGACCCGCCTGTACCAGAATCCGACC
ACGTACATCTCTATCGGCACTTCTACCCTGAATCAACGCCTGGTGCCGAA
AATCGCAACTCGCAGCAAAGTCAACGGCCAATCTGGTCGCATGGAGTTTT
TCTGGACCATCCTGAAACCGAACGACGCGATTAACTTCGAAAGCAACGGC
AACTTCATTGCACCGGAATATGCTTACAAGATCGTTAAAAAGGGTGATTC
TGCGATCATGAAAAGCGAGTAATAGGCTGAGC
SEQ ID NO:80 STF2.HA1-1 NC
ATGGCACAAGTAATCAACACTAACAGTCTGTCGCTGCTGACCCAGAATAA
CCTGAACAAATCCCAGTCCGCACTGGGCACCGCTATCGAGCGTCTGTCTT
CTGGTCTGCGTATCAACAGCGCGAAAGACGATGCGGCAGGTCAGGCGATT
GCTAACCGTTTCACCGCGAACATCAAAGGTCTGACTCAGGCTTCCCGTAA
CGCTAACGACGGTATCTCCATTGCGCAGACCACTGAAGGCGCGCTGAACG
AAATCAACAACAACCTGCAGCGTGTGCGTGAACTGGCGGTTCAGTCTGCT
AACAGCACCAACTCCCAGTCTGACCTCGACTCCATCCAGGCTGAAATCAC
CCAGCGCCTGAACGAAATCGACCGTGTATCCGGCCAGACTCAGTTCAACG
GCGTGAAAGTCCTGGCGCAGGACAACACCCTGACCATCCAGGTTGGCGCC
AACGACGGTGAAACTATCGATATCGATCTGAAGCAGATCAACTCTCAGAC
CCTGGGTCTGGACTCACTGAACGTGCAGAAAGCGTATGATGTGAAAGATA
CAGCAGTAACAACGAAAGCTTATGCCAATAATGGTACTACACTGGATGTA
TCGGGTCTTGATGATGCAGCTATTAAAGCGGCTACGGGTGGTACGAATGG
TACGGCTTCTGTAACCGGTGGTGCGGTTAAATTTGACGCAGATAATAACA
AGTACTTTGTTACTATTGGTGGCTTTACTGGTGCTGATGCCGCCAAAAAT
GGCGATTATGAAGTTAACGTTGCTACTGACGGTACAGTAACCCTTGCGGC
TGGCGCAACTAAAACCACAATGCCTGCTGGTGCGACAACTAAAACAGAAG
TACAGGAGTTAAAAGATACACCGGCAGTTGTTTCAGCAGATGCTAAAAAT
GCCTTAATTGCTGGCGGCGTTGACGCTACCGATGCTAATGGCGCTGAGTT
GGTCAAAATGTCTTATACCGATAAAAATGGTAAGACAATTGAAGGCGGTT
ATGCGCTTAAAGCTGGCGATAAGTATTACGCCGCAGATTACGATGAAGCG
ACAGGAGCAATTAAAGCTAAAACCACAAGTTATACTGCTGCTGACGGCAC
TACCAAAACAGCGGCTAACCAACTGGGTGGCGTAGACGGTAAAACCGAAG
TCGTTACTATCGACGGTAAAACCTACAATGCCAGCAAAGCCGCTGGTCAT
GATTTCAAAGCACAACCAGAGCTGGCGGAAGCAGCCGCTAAAACCACCGA
AAACCCGCTGCAGAAAATTGATGCCGCGCTGGCGCAGGTGGATGCGCTGC
GCTCTGATCTGGGTGCGGTACAAAACCGTTTCAACTCTGCTATCACCAAC
CTGGGCAATACCGTAAACAATCTGTCTGAAGCGCGTAGCCGTATCGAAGA
TTCCGACTACGCGACCGAAGTTTCCAACATGTCTCGCGCGCAGATTTTGC
AGCAGGCCGGTACTTCCGTTCTGGCGCAGGCTAACCAGGTCCCGCAGAAC
GTGCTGAGCCTGTTAGCGTCCCACAACGGTAAACTGTGTCTGCTGAAAGG
CATCGCACCGCTGCAGCTGGGTAACTGTAGCGTTGCAGGTTGGATCCTGG
GTAACCCGGAGTGCGAACTGCTGATTTCCAAGGAGAGCTGGTCTTACATT
GTCGAAACGCCGAATCCGGAAAACGGCACTTGTTATCCGGGTTACTTCGC
CGATTACGAAGAACTGCGTGAACAACTGTCTTCCGTGAGCTCTTTCGAAC
GTTTCGAGATCTTCCCGAAAGAGAGCAGCTGGCCAAACCACACTGTTACC
GGTGTGTCTGCGAGCTGTTCTCACAACGGCAAGTCTTCTTTCTACCGCAA
CCTGCTGTGGCTGACGGGTAAGAATGGCCTGTATCCGAACCTGTCTAAAT
CTTACGTAAACAACAAAGAGAAAGAGGTGCTGGTCCTGTGGGGCGTACAC
CATCCACCAAATATCGGCAACCAGCGCGCCCTGTACCACACCGAAAACGC
TTATGTGTCCGTGGTGAGCTCCCATTACAGCCGTCGTTTTACTCCGGAGA
TTGCCAAACGTCCGAAAGTTCGTGATCAGGAAGGCCGTATTAACTACTAC
TGGACTCTGCTGGAGCCGGGCGATACCATCATTTTCGAGGCAAACGGCAA
CCTGATTGCGCCATGGTACGCGTTCGCCCTGAGCCGTGGTTTTGGCTCCG
GTATTATCACCTCTAACGCGCCAATGGACGAATGCGACGCGAAATGCCAA
ACGCCGCAGGGCGCAATCAACAGCAGCCTGCCGTTCCAGAACGTTCACCC
GGTTACCATCGGCGAATGCCCTAAATACGTGCGCTAATAG
SEQ ID NO:81 FOR PRIMER
AACCAGGTCCCGCAGAACGTGCTGAGCCTGTTAGCGTCCCACAACGGTAA
ACTGTGTCTGCTGAAAGGCATCGCACCGCTGCAG
SEQ ID NO:82 REV PRIMER
GAACAGCTCAGTTCCTACGAGCTCAGCCTATTAGCGCACGTATTTAGGGC
ATTCGCCGATGTAACCGGGTGAACGTT
SEQ ID NO:83 HA0s NC
GACACGATCTGTATTGGTTATCATGCAAACAACTCTACTGACACTGTAGA
TACTGTGCTGGAAAAGAACGTAACCGTTACCCACAGCGTTAACCTGCTGG
AAGATTCCCACAACGGTAAACTGTGTCTGCTGAAAGGCATCGCACCGCTG
CAGCTGGGTAACTGTAGCGTTGCAGGTTGGATCCTGGGTAACCCGGAGTG
CGAACTGCTGATTTCCAAGGAGAGCTGGTCTTACATTGTCGAAACGCCGA
ATCCGGAAAACGGCACTTGTTATCCGGGTTACTTCGCCGATTACGAAGAA
CTGCGTGAACAACTGTCTTCCGTGAGCTCTTTCGAACGTTTCGAGATCTT
CCCGAAAGAGAGCAGCTGGCCAAACCACACTGTTACCGGTGTGTCTGCGA
GCTGTTCTCACAACGGCAAGTCTTCTTTCTACCGCAACCTGCTGTGGCTG
ACGGGTAAGAATGGCCTGTATCCGAACCTGTCTAAATCTTACGTAAACAA
CAAAGAGAAAGAGGTGCTGGTCCTGTGGGGCGTACACCATCCACCAAATA
TCGGCAACCAGCGCGCCCTGTACCACACCGAAAACGCTTATGTGTCCGTG
GTGAGCTCCCATTACAGCCGTCGTTTTACTCCGGAGATTGCCAAACGTCC
GAAAGTTCGTGATCAGGAAGGCCGTATTAACTACTACTGGACTCTGCTGG
AGCCGGGCGATACCATCATTTTCGAGGCAAACGGCAACCTGATTGCGCCA
TGGTACGCGTTCGCCCTGAGCCGTGGTTTTGGCTCCGGTATTATCACCTC
TAACGCGCCAATGGACGAATGCGACGCGAAATGCCAAACGCCGCAGGGCG
CAATCAACAGCAGCCTGCCGTTCCAGAACGTTCACCCGGTTACCATCGGC
GAATGCCCTAAATACGTGCGCTCCGCCAAACTGCGCATGGTTACTGGTCT
GCGTAACATCCCGAGCATTCAGTCTCGCGGTCTGTTCGGTGCGATCGCGG
GCTTCATTGAAGGCGGTTGGACCGGTATGGTGGATGGTTGGTACGGCTAC
CATCACCAGAACGAACAGGGTAGCGGTTACGCTGCCGACCAGAAATCCAC
CCAGAACGCTATTAACGGTATCACCAACAAAGTTAACAGCGTAATTGAGA
AGATGAACACGCAGTTCACCGCCGTAGGTAAGGAATTCAACAAGCTGGAA
CGTCGCATGGAAAACCTGAACAAAAAGGTGGACGACGGCTTTCTGGACAT
CTGGACCTACAACGCTGAACTGCTGGTGCTGCTGGAAAACGAACGTACCC
TGGATTTCCACGACTCTAATGTTAAAAACCTGTACGAAAAGGTCAAGTCT
CAACTGAAAAACAATGCGAAGGAAATCGGCAACGGCTGTTTCGAATTCTA
CCATAAATGCAACAACGAATGCATGGAATCCGTTAAAAACGGTACCTATG
ACTACCCTAAATACTCCGAAGAAAGCAAACTGAACCGCGAGAAAATCGAT
GGTGTAAAACTGGAATCTATGGGTGTTTACCAGATCCTGGCGATCTACTC
CACGGTAGCCAGCAGCCTGGTTCTGCTGGTTAGCCTGGGTGCAATTAGCT
TCTGGATGTGCTCTAACGGCAGCCTGCAATGCCGCATCTGTAATAGGCTG
AGC
SEQ ID NO:84 STF2.HA1-2 NC
ATGGCACAAGTAATCAACACTAACAGTCTGTCGCTGCTGACCCAGAATAA
CCTGAACAAATCCCAGTCCGCACTGGGCACCGCTATCGAGCGTCTGTCTT
CTGGTCTGCGTATCAACAGCGCGAAAGACGATGCGGCAGGTCAGGCGATT
GCTAACCGTTTCACCGCGAACATCAAAGGTCTGACTCAGGCTTCCCGTAA
CGCTAACGACGGTATCTCCATTGCGCAGACCACTGAAGGCGCGCTGAACG
AAATCAACAACAACCTGCAGCGTGTGCGTGAACTGGCGGTTCAGTCTGCT
AACAGCACCAACTCCCAGTCTGACCTCGACTCCATCCAGGCTGAAATCAC
CCAGCGCCTGAACGAAATCGACCGTGTATCCGGCCAGACTCAGTTCAACG
GCGTGAAAGTCCTGGCGCAGGACAACACCCTGACCATCCAGGTTGGCGCC
AACGACGGTGAAACTATCGATATCGATCTGAAGCAGATCAACTCTCAGAC
CCTGGGTCTGGACTCACTGAACGTGCAGAAAGCGTATGATGTGAAAGATA
CAGCAGTAACAACGAAAGCTTATGCCAATAATGGTACTACACTGGATGTA
TCGGGTCTTGATGATGCAGCTATTAAAGCGGCTACGGGTGGTACGAATGG
TACGGCTTCTGTAACCGGTGGTGCGGTTAAATTTGACGCAGATAATAACA
AGTACTTTGTTACTATTGGTGGCTTTACTGGTGCTGATGCCGCCAAAAAT
GGCGATTATGAAGTTAACGTTGCTACTGACGGTACAGTAACCCTTGCGGC
TGGCGCAACTAAAACCACAATGCCTGCTGGTGCGACAACTAAAACAGAAG
TACAGGAGTTAAAAGATACACCGGCAGTTGTTTCAGCAGATGCTAAAAAT
GCCTTAATTGCTGGCGGCGTTGACGCTACCGATGCTAATGGCGCTGAGTT
GGTCAAAATGTCTTATACCGATAAAAATGGTAAGACAATTGAAGGCGGTT
ATGCGCTTAAAGCTGGCGATAAGTATTACGCCGCAGATTACGATGAAGCG
ACAGGAGCAATTAAAGCTAAAACCACAAGTTATACTGCTGCTGACGGCAC
TACCAAAACAGCGGCTAACCAACTGGGTGGCGTAGACGGTAAAACCGAAG
TCGTTACTATCGACGGTAAAACCTACAATGCCAGCAAAGCCGCTGGTCAT
GATTTCAAAGCACAACCAGAGCTGGCGGAAGCAGCCGCTAAAACCACCGA
AAACCCGCTGCAGAAAATTGATGCCGCGCTGGCGCAGGTGGATGCGCTGC
GCTCTGATCTGGGTGCGGTACAAAACCGTTTCAACTCTGCTATCACCAAC
CTGGGCAATACCGTAAACAATCTGTCTGAAGCGCGTAGCCGTATCGAAGA
TTCCGACTACGCGACCGAAGTTTCCAACATGTCTCGCGCGCAGATTTTGC
AGCAGGCCGGTACTTCCGTTCTGGCGCAGGCTAACCAGGTCCCGCAGAAC
GTGCTGAGCCTGTTAGCGAAAGGCATCGCACCGCTGCAGCTGGGTAACTG
TAGCGTTGCAGGTTGGATCCTGGGTAACCCGGAGTGCGAACTGCTGATTT
CCAAGGAGAGCTGGTCTTACATTGTCGAAACGCCGAATCCGGAAAACGGC
ACTTGTTATCCGGGTTACTTCGCCGATTACGAAGAACTGCGTGAACAACT
GTCTTCCGTGAGCTCTTTCGAACGTTTCGAGATCTTCCCGAAAGAGAGCA
GCTGGCCAAACCACACTGTTACCGGTGTGTCTGCGAGCTGTTCTCACAAC
GGCAAGTCTTCTTTCTACCGCAACCTGCTGTGGCTGACGGGTAAGAATGG
CCTGTATCCGAACCTGTCTAAATCTTACGTAAACAACAAAGAGAAAGAGG
TGCTGGTCCTGTGGGGCGTACACCATCCACCAAATATCGGCAACCAGCGC
GCCCTGTACCACACCGAAAACGCTTATGTGTCCGTGGTGAGCTCCCATTA
CAGCCGTCGTTTTACTCCGGAGATTGCCAAACGTCCGAAAGTTCGTGATC
AGGAAGGCCGTATTAACTACTACTGGACTCTGCTGGAGCCGGGCGATACC
ATCATTTTCGAGGCAAACGGCAACCTGATTGCGCCATGGTACGCGTTCGC
CCTGAGCCGTGGTTTTGGCTCCGGTATTATCACCTCTTAATAA
SEQ ID NO:85 FOR PRIMER
AACCAGGTCCCGCAGAACGTGCTGAGCCTGTTAGCGAAAGGCATCGCACC
GCTGCAGCTGGGTAACTGTAGCGTTGCAGGTTGG
SEQ ID NO:86 REV PRIMER
GAACAGCTCAGTTCCTACGAGCTCAGCCTATTAAGAGGTGATAATACCGG
AGCCAAAACCACGGCTCAGGGCGAACGCGTACCA
SEQ ID NO:87 STF2.HA1-2mut NC
ATGGCACAAGTAATCAACACTAACAGTCTGTCGCTGCTGACCCAGAATAA
CCTGAACAAATCCCAGTCCGCACTGGGCACCGCTATCGAGCGTCTGTCTT
CTGGTCTGCGTATCAACAGCGCGAAAGACGATGCGGCAGGTCAGGCGATT
GCTAACCGTTTCACCGCGAACATCAAAGGTCTGACTCAGGCTTCCCGTAA
CGCTAACGACGGTATCTCCATTGCGCAGACCACTGAAGGCGCGCTGAACG
AAATCAACAACAACCTGCAGCGTGTGCGTGAACTGGCGGTTCAGTCTGCT
AACAGCACCAACTCCCAGTCTGACCTCGACTCCATCCAGGCTGAAATCAC
CCAGCGCCTGAACGAAATCGACCGTGTATCCGGCCAGACTCAGTTCAACG
GCGTGAAAGTCCTGGCGCAGGACAACACCCTGACCATCCAGGTTGGCGCC
AACGACGGTGAAACTATCGATATCGATCTGAAGCAGATCAACTCTCAGAC
CCTGGGTCTGGACTCACTGAACGTGCAGAAAGCGTATGATGTGAAAGATA
CAGCAGTAACAACGAAAGCTTATGCCAATAATGGTACTACACTGGATGTA
TCGGGTCTTGATGATGCAGCTATTAAAGCGGCTACGGGTGGTACGAATGG
TACGGCTTCTGTAACCGGTGGTGCGGTTAAATTTGACGCAGATAATAACA
AGTACTTTGTTACTATTGGTGGCTTTACTGGTGCTGATGCCGCCAAAAAT
GGCGATTATGAAGTTAACGTTGCTACTGACGGTACAGTAACCCTTGCGGC
TGGCGCAACTAAAACCACAATGCCTGCTGGTGCGACAACTAAAACAGAAG
TACAGGAGTTAAAAGATACACCGGCAGTTGTTTCAGCAGATGCTAAAAAT
GCCTTAATTGCTGGCGGCGTTGACGCTACCGATGCTAATGGCGCTGAGTT
GGTCAAAATGTCTTATACCGATAAAAATGGTAAGACAATTGAAGGCGGTT
ATGCGCTTAAAGCTGGCGATAAGTATTACGCCGCAGATTACGATGAAGCG
ACAGGAGCAATTAAAGCTAAAACCACAAGTTATACTGCTGCTGACGGCAC
TACCAAAACAGCGGCTAACCAACTGGGTGGCGTAGACGGTAAAACCGAAG
TCGTTACTATCGACGGTAAAACCTACAATGCCAGCAAAGCCGCTGGTCAT
GATTTCAAAGCACAACCAGAGCTGGCGGAAGCAGCCGCTAAAACCACCGA
AAACCCGCTGCAGAAAATTGATGCCGCGCTGGCGCAGGTGGATGCGCTGC
GCTCTGATCTGGGTGCGGTACAAAACCGTTTCAACTCTGCTATCACCAAC
CTGGGCAATACCGTAAACAATCTGTCTGAAGCGCGTAGCCGTATCGAAGA
TTCCGACTACGCGACCGAAGTTTCCAACATGTCTCGCGCGCAGATTTTGC
AGCAGGCCGGTACTTCCGTTCTGGCGCAGGCTAACCAGGTCCCGCAGAAC
GTGCTGAGCCTGTTAGCGAAAGGCGCGGCACCGCTGCAGCTGGGTAACTG
TAGCGTTGCAGGTTGGATCCTGGGTAACCCGGAGTGCGAACTGCTGATTT
CCAAGGAGAGCTGGTCTGATATTGCAGAAACGCCGAATCCGGAAAACGGC
ACTTGTTATCCGGGTTACTTCGCCGATTACGAAGAACTGCGTGAACAACT
GTCTTCCGTGAGCTCTTTCGAACGTTTCGAGATCTTCCCGAAAGAGAGCA
GCTGGCCAAACCACACTGTTACCGGTGTGTCTGCGAGCTGTTCTCACAAC
GGCAAGTCTTCTTTCTACCGCAACCTGCTGTGGCTGACGGGTAAGAATGG
CCTGTATCCGAACCTGTCTAAATCTTACGTAAACAACAAAGAGAAAGAGG
TGCTGGTCCTGTGGGGCGTACACCATCCACCAAATATCGGCAACCAGCGC
GCCCTGTACCACACCGAAAACGCTTATGTGTCCGTGGTGAGCTCCCATTA
CAGCCGTCGTTTTACTCCGGAGATTGCCAAACGTCCGAAAGTTCGTGATC
AGGAAGGCCGTATTAACTACTACTGGACTCTGCTGGAGCCGGGCGATACC
ATCATTTTCGAGGCAAACGGCAACCTGATTGCGCCATGGTACGCGTTCGC
CCTGAGCCGTGGTTTTGGCTCCGGTATTATCACCTCTTAATAG
SEQ ID NO:88 HA1-2mut NC
GCTGAGCCTGTTAGCGAAAGGCGCGGCACCGCTGCAGCTGGGTAACTGTA
GCGTTGCAGGTTGGATCCTGGGTAACCCGGAGTGCGAACTGCTGATTTCC
AAGGAGAGCTGGTCTGATATTGCAGAAACGCCGAATCCGGAAAACGGCAC
TTGTTATCCGGGTTACTTCGCCGATTACGAAGAACTGCGTGAACAACTGT
CTTCCGTGAGCTCTTTCGAACGTTTCGAGATCTTCCCGAAAGAGAGCAGC
TGGCCAAACCACACTGTTACCGGTGTGTCTGCGAGCTGTTCTCACAACGG
CAAGTCTTCTTTCTACCGCAACCTGCTGTGGCTGACGGGTAAGAATGGCC
TGTATCCGAACCTGTCTAAATCTTACGTAAACAACAAAGAGAAAGAGGTG
CTGGTCCTGTGGGGCGTACACCATCCACCAAATATCGGCAACCAGCGCGC
CCTGTACCACACCGAAAACGCTTATGTGTCCGTGGTGAGCTCCCATTACA
GCCGTCGTTTTACTCCGGAGATTGCCAAACGTCCGAAAGTTCGTGATCAG
GAAGGCCGTATTAACTACTACTGGACTCTGCTGGAGCCGGGCGATACCAT
CATTTTCGAGGCAAACGGCAACCTGATTGCGCCATGGTACGCGTTCGCCC
TGAGCCGTGGTTTTGGCTCCGGTATTATCACCTCTTAATAGGCTGAGC
SEQ ID NO:89 STF2.HA1-1his (PR8)
MAQVINTNSLSLLTQNNLNKSQSALGTAIERLSSGLRINSAKDDAAGQAI
ANRFTANIKGLTQASRNANDGISIAQTTEGALNEINNNLQRVRELAVQSA
NSTNSQSDLDSIQAEITQRLNEIDRVSGQTQFNGVKVLAQDNTLTIQVGA
NDGETIDIDLKQINSQTLGLDSLNVQKAYDVKDTAVTTKAYANNGTTLDV
SGLDDAAIKAATGGTNGTASVTGGAVKFDADNNKYFVTIGGFTGADAAKN
GDYEVNVATDGTVTLAAGATKTTMPAGATTKTEVQELKDTPAVVSADAKN
ALIAGGVDATDANGAELVKMSYTDKNGKTIEGGYALKAGDKYYAADYDEA
TGAIKAKTTSYTAADGTTKTAANQLGGVDGKTEVVTIDGKTYNASKAAGH
DFKAQPELAEAAAKTTENPLQKIDAALAQVDALRSDLGAVQNRFNSAITN
LGNTVNNLSEARSRIEDSDYATEVSNMSRAQILQQAGTSVLAQANQVPQN
VLSLLASHNGKLCRLKGIAPLQLGKCNIAGWLLGNPECDPLLPVRSWSYI
VETPNSENGICYPGDFIDYEELREQLSSVSSFERFEIFPKESSWPNHNTN
GVTAACSHEGKSSFYRNLLWLTEKEGSYPKLKNSYVNKKGKEVLVLWGIH
HPPNSKEQQNLYQNENAYVSVVTSNYNRRFTPEIAERPKVRDQAGRMNYY
WTLLKPGDTIIFEANGNLIAPMYAFALSRGFGSGIITSNASMHECNTKCQ
TPLGAINSSLPYQNIHPVTIGECPKYVRHHHHHH
SEQ ID NO:90 STF2.HA1-2 (PR8)
MAQVINTNSLSLLTQNNLNKSQSALGTAIERLSSGLRINSAKDDAAGQAI
ANRFTANIKGLTQASRNANDGISIAQTTEGALNEINNNLQRVRELAVQSA
NSTNSQSDLDSIQAEITQRLNEIDRVSGQTQFNGVKVLAQDNTLTIQVGA
NDGETIDIDLKQINSQTLGLDSLNVQKAYDVKDTAVTTKAYANNGTTLDV
SGLDDAAIKAATGGTNGTASVTGGAVKFDADNNKYFVTIGGFTGADAAKN
GDYEVNVATDGTVTLAAGATKTTMPAGATTKTEVQELKDTPAVVSADAKN
ALIAGGVDATDANGAELVKMSYTDKNGKTIEGGYALKAGDKYYAADYDEA
TGAIKAKTTSYTAADGTTKTAANQLGGVDGKTEVVTIDGKTYNASKAAGH
DFKAQPELAEAAAKTTENPLQKIDAALAQVDALRSDLGAVQNRFNSAITN
LGNTVNNLSEARSRIEDSDYATEVSNMSRAQILQQAGTSVLAQANQVPQN
VLSLLAKGIAPLQLGKCNIAGWLLGNPECDPLLPVRSWSYIVETPNSENG
ICYPGDFIDYEELREQLSSVSSFERFEIFPKESSWPNHNTNGVTAACSHE
GKSSFYRNLLWLTEKEGSYPKLKNSYVNKKGKEVLVLWGIHHPPNSKEQQ
NLYQNENAYVSVVTSNYNRRFTPEIAERPKVRDQAGRMNYYWTLLKPGDT
IIFEANGNLIAPMYAFALSRGFGSGIITS
SEQ ID NO:91 STF2.RA1-2mut (PR8)
MAQVINTNSLSLLTQNNLNKSQSALGTAIERLSSGLRINSAKDDAAGQAI
ANRFTANIKGLTQASRNANDGISIAQTTEGALNEINNNLQRVRELAVQSA
NSTNSQSDLDSIQAEITQRLNEIDRVSGQTQFNGVKVLAQDNTLTIQVGA
NDGETIDIDLKQINSQTLGLDSLNVQKAYDVKDTAVTTKAYANNGTTLDV
SGLDDAAIKAATGGTNGTASVTGGAVKFDADNNKYFVTIGGFTGADAAKN
GDYEVNVATDGTVTLAAGATKTTMPAGATTKTEVQELKDTPAVVSADAKN
ALIAGGVDATDANGAELVKMSYTDKNGKTIEGGYALKAGDKYYAADYDEA
TGAIKAKTTSYTAADGTTKTAANQLGGVDGKTEVVTIDGKTYNASKAAGH
DFKAQPELAEAAAKTTENPLQKIDAALAQVDALRSDLGAVQNRFNSAITN
LGNTVNNLSEARSRIEDSDYATEVSNMSRAQILQQAGTSVLAQANQVPQN
VLSLLAKGAAPLQLGKCNIAGWLLGNPECDPLLPVRSWSDIAETPNSENG
ICYPGDFIDYEELREQLSSVSSFERFEIFPKESSWPNHNTNGVTAACSHE
GKSSFYRNLLWLTEKEGSYPKLKNSYVNKKGKEVLVLWGIHHPPNSKEQQ
NLYQNENAYVSVVTSNYNRRFTPEIAERPKVRDQAGRMNYYWTLLKPGDT
IIFEANGNLIAPMYAFALSRGFGSGIITS
SEQ ID NO:92 STF2.HA1-3 (PR8)
MAQVINTNSLSLLTQNNLNKSQSALGTAIERLSSGLRINSAKDDAAGQAI
ANRFTANIKGLTQASRNANDGISIAQTTEGALNEINNNLQRVRELAVQSA
NSTNSQSDLDSIQAEITQRLNEIDRVSGQTQFNGVKVLAQDNTLTIQVGA
NDGETIDIDLKQINSQTLGLDSLNVQKAYDVKDTAVTTKAYANNGTTLDV
SGLDDAAIKAATGGTNGTASVTGGAVKFDADNNKYFVTIGGFTGADAAKN
GDYEVNVATDGTVTLAAGATKTTMPAGATTKTEVQELKDTPAVVSADAKN
ALIAGGVDATDANGAELVKMSYTDKNGKTIEGGYALKAGDKYYAADYDEA
TGAIKAKTTSYTAADGTTKTAANQLGGVDGKTEVVTIDGKTYNASKAAGH
DFKAQPELAEAAAKTTENPLQKIDAALAQVDALRSDLGAVQNRFNSAITN
LGNTVNNLSEARSRIEDSDYATEVSNMSRAQILQQAGTSVLAQANQVPQN
VLSLLANSENGICYPGDFIDYEELREQLSSVSSFERFEIFPKESSWPNHN
TNGVTAACSHEGKSSFYRNLLWLTEKEGSYPKLKNSYVNKKGKEVLVLWG
IHHPPNSKEQQNLYQNENAYVSVVTSNYNRRFTPEIAERPKVRDQAGRMN
YYWTLLKPGDTIIFEANGNLIAPMYAFALSRG
SEQ ID NO:93 HA1-2his (PR8)
KGIAPLQLGKCNIAGWLLGNPECDPLLPVRSWSYIVETPNSENGICYPGD
FIDYEELREQLSSVSSFERFEIFPKESSWPNHNTNGVTAACSHEGKSSFY
RNLLWLTEKEGSYPKLKNSYVNKKGKEVLVLWGIHHPPNSKEQQNLYQNE
NAYVSVVTSNYNRRFTPEIAERPKVRDQAGRMNYYWTLLKPGDTIIFEAN
GNLIAPMYAFALSRGFGSGIITSHHHHHH
SEQ ID NO:94 STF2.4xM2e
MAQVINTNSLSLLTQNNLNKSQSALGTAIERLSSGLRINSAKDDAAGQAI
ANRFTANIKGLTQASRNANDGISIAQTTEGALNEINNNLQRVRELAVQSA
NSTNSQSDLDSIQAEITQRLNEIDRVSGQTQFNGVKVLAQDNTLTIQVGA
NDGETIDIDLKQINSQTLGLDSLNVQKAYDVKDTAVTTKAYANNGTTLDV
SGLDDAAIKAATGGTNGTASVTGGAVKFDADNNKYFVTIGGFTGADAAKN
GDYEVNVATDGTVTLAAGATKTTMPAGATTKTEVQELKDTPAVVSADAKN
ALIAGGVDATDANGAELVKMSYTDKNGKTIEGGYALKAGDKYYAADYDEA
TGAIKAKTTSYTAADGTTKTAANQLGGVDGKTEVVTIDGKTYNASKAAGH
DFKAQPELAEAAAKTTENPLQKIDAALAQVDALRSDLGAVQNRFNSAITN
LGNTVNNLSEARSRIEDSDYATEVSNMSRAQILQQAGTSVLAQANQVPQN
VLSLLRLSLLTEVETPIRNEWGSRSNDSSDPLESLLTEVETPIRNEWGSR
SNDSSDPGSSLLTEVETPIRNEWGSRSNDSSDPELSLLTEVETPIRNEWG
SRSNDSSDPSR
SEQ ID NO:95 STF2.HA1-2 (VN)
MAQVINTNSLSLLTQNNLNKSQSALGTAIERLSSGLRINSAKDDAAGQAI
ANRFTANIKGLTQASRNANDGISIAQTTEGALNEINNNLQRVRELAVQSA
NSTNSQSDLDSIQAEITQRLNEIDRVSGQTQFNGVKVLAQDNTLTIQVGA
NDGETIDIDLKQINSQTLGLDSLNVQKAYDVKDTAVTTKAYANNGTTLDV
SGLDDAAIKAATGGTNGTASVTGGAVKFDADNNKYFVTIGGFTGADAAKN
GDYEVNVATDGTVTLAAGATKTTMPAGATTKTEVQELKDTPAVVSADAKN
ALIAGGVDATDANGAELVKMSYTDKNGKTIEGGYALKAGDKYYAADYDEA
TGAIKAKTTSYTAADGTTKTAANQLGGVDGKTEVVTIDGKTYNASKAAGH
DFKAQPELAEAAAKTTENPLQKIDAALAQVDALRSDLGAVQNRFNSAITN
LGNTVNNLSEARSRIEDSDYATEVSNMSPAQILQQAGTSVLAQANQVPQN
VLSLLAGVKPLILRDCSVAGWLLGNPMCDEFINVPEWSYIVEKANPVNDL
CYPGDFNDYEELKHLLSRINHFEKIQIIPKSSWSSHEASLGVSSACPYQG
KSSFFRNVVWLIKKNSTYPTIKRSYNNTNQEDLLVLWGIHHPNDAAEQTK
LYQNPTTYISVGTSTLNQRLVPRIATRSKVNGQSGRMEFFWTILKPNDAI
NFESNGNFIAPEYAYKIVKKGDSTIMKSE
SEQ ID NO:96 STF2
MAQVINTNSLSLLTQNNLNKSQSALGTAIERLSSGLRINSAKDDAAGQAI
ANRFTANIKGLTQASRNANDGISIAQTTEGALNEINNNLQRVRELAVQSA
NSTNSQSDLDSIQAEITQRLNEIDRVSGQTQFNGVKVLAQDNTLTIQVGA
NDGETIDIDLKQINSQTLGLDSLNVQKAYDVKDTAVTTKAYANNGTTLDV
SGLDDAAIKAATGGTNGTASVTGGAVKFDADNNKYFVTIGGFTGADAAKN
GDYEVNVATDGTVTLAAGATKTTMPAGATTKTEVQELKDTPAVVSADAKN
ALIAGGVDATDANGAELVKMSYTDKNGKTIEGGYALKAGDKYYAADYDEA
TGAIKAKTTSYTAADGTTKTAANQLGGVDGKTEVVTIDGKTYNASKAAGH
DFKAQPELAEAAAKTTENPLQKIDAALAQVDALRSDLGAVQNRFNSAITN
LGNTVNNLSEARSRIEDSDYATEVSNMSRAQILQQAGTSVLAQANQVPQN
VLSLLA
SEQ ID NO:97 STF2.Blp.wt
ATGAAATTCTTAGTCAACGTTGCCCTTGTTTTTATGGTCGTATACATTTC
TTACATCTATGCGGCCCAGGTTATCAATACCAACTCCCTGTCGTTGCTCA
CCCAAAATAACCTTAATAAAAGCCAGAGCGCACTGGGAACCGCCATAGAA
CGCCTCTCAAGCGGCCTCCGGATCAATTCTGCAAAAGACGACGCCGCCGG
TCAGGCCATCGCAAACCGCTTTACCGCCAATATCAAGGGACTGACGCAGG
CTTCGAGGAATGCTAACGATGGAATAAGCATCGCTCAAACCACGGAGGGC
GCCCTGAACGAGATCAACAACAACCTACAGCGCGTCAGGGAGCTCGCAGT
GCAGTCCGCCAATTCGACCAACTCGCAGTCGGACCTGGACTCGATCCAAG
CCGAAATCACCCAGCGCCTGAATGAGATTGACCGGGTGAGCGGTCAGACA
CAGTTTAACGGCGTGAAGGTACTTGCACAGGATAACACACTTACGATACA
GGTGGGCGCCAACGATGGTGAAACCATAGACATTGATCTCAAACAGATTA
ACAGCCAGACGCTCGGGTTGGATAGCCTGAATGTGCAAAAGGCGTACGAC
GTGAAAGACACGGCGGTCACTACCAAAGCCTACGCTAACAATGGCACTAC
CTTGGATGTGAGCGGATTGGATGATGCAGCAATCAAGGCTGCTACCGGCG
GTACGAACGGAACCGCGTCCGTGACCGGCGGTGCCGTGAAGTTCGATGCT
GACAACAATAAGTATTTCGTCACCATTGGAGGCTTTACTGGCGCCGACGC
AGCAAAGAACGGCGACTATGAAGTGAACGTGGCAACCGATGGAACCGTGA
CGCTGGCCGCTGGTGCCACCAAGACCACCATGCCAGCCGGCGCCACAACT
AAGACCGAGGTGCAGGAGTTAAAGGACACCCCCGCGGTGGTTAGCGCAGA
TGCCAAAAACGCGTTGATCGCCGGCGGAGTGGATGCAACTGATGCTAATG
GTGCGGAGCTGGTTAAAATGTCGTATACAGACAAGAATGGTAAGACGATC
GAGGGCGGTTATGCCCTTAAGGCAGGAGATAAGTATTACGCTGCTGATTA
CGATGAGGCGACGGGAGCTATTAAGGCCAAGACAACGTCATACACGGCGG
CGGACGGAACGACTAAGACGGCTGCCAATCAGTTGGGAGGGGTTGACGGG
AAGACAGAGGTCGTTACGATCGATGGCAAGACATACAACGCCTCCAAGGC
CGCTGGCCACGATTTCAAAGCTCAACCCGAACTGGCCGAGGCCGCGGCGA
AAACAACTGAGAACCCGTTGCAGAAGATTGATGCGGCCCTGGCGCAAGTA
GATGCCCTGCGCTCAGACCTGGGCGCCGTTCAAAATCGATTCAATTCCGC
GATTACAAACCTGGGCAATACAGTAAACAATCTATCCGAGGCCAGATCCC
GCATTGAAGACTCCGACTACGCGACAGAAGTAAGTAACATGAGTCGTGCC
CAGATTCTGCAGCAGGCCGGCACTAGTGTCCTGGCCCAGGCCAATCAAGT
CCCGCAGAATGTGCTGAGCCTACTACGAGAGTTCAGTCGTTACCCAGCCC
AATGGCGGCCGCTC
SEQ ID NO:98 STF2.Blp.ng
ATGAAATTCTTAGTCAACGTTGCCCTTGTTTTTATGGTCGTATACATTTC
TTACATCTATGCGGCCCAAGTGATCAACACCAACTCCCTGTCCCTGCTCA
CTCAAAACAACCTCCAGAAATCTCAGTCTGCTCTCGGTACTGCTATCGAG
CGTCTCTCCTCCGGCCTGAGGATCAACTCCGCTAAAGATGACGCCGCCGG
ACAAGCTATCGCTAACCGCTTTACTGCCAACATTAAAGGCCTGACCCAAG
CCTCTAGGAACGCCAATGATGGCATTTCTATCGCTCAAACCACCGAAGGC
GCCCTGAACGAAATCAATAATAACCTGCAACGTGTCCGCGAACTCGCCGT
CCAGTCCGCCCAATCTACCAACTCTCAGTCTGACCTGGACTCTATCCAAG
CTGAGATCACCCAAAGGCTCAACGAGATCGATCGTGTGTCTGGTCAAACT
CAGTTTAACGGCGTCAAAGTGCTGGCTCAAGACAACACACTCACCATCCA
AGTAGGAGCCAATGACGGCGAGACAATCGATATCGACCTGAAGCAGATCA
ATTCTCAAACTCTGGGCCTGGACTCCCTGAACGTCCAAAAGGCTTACGAC
GTGAAGGACACCGCTGTGACAACCAAAGCCTATGCTAATCAAGGAACAAC
CCTGGACGTGTCCGGACTCGATGACGCCGCTATCAAGGCCGCTACTGGCG
GCACTCAGGGAACTGCCTCTGTGACCGGAGGCGCTGTGAAGTTCGACGCC
GATAACAACAAATACTTCGTCACTATTGGTGGTTTCACTGGCGCTGACGC
CGCTAAGAACGGTGACTACGAGGTCAACGTCGCCACTGACGGAACAGTGA
CACTGGCCGCTGGCGCTACCAAGACCACAATGCCTGCTGGTGCTACTACT
AAGACAGAGGTGCAGGAACTCAAGGACACCCCTGCCGTGGTGTCCGCCGA
TGCTAAGAACGCTCTCATTGCTGGTGGTGTCGACGCTACGGACGCCAACG
GAGCCGAGCTTGTGAAAATGTCCTACACCGACAAGAACGGAAAGACTATC
GAGGGAGGTTACGCTCTGAAGGCTGGCGATAAGTACTACGCCGCTGATTA
TGACGAAGCTACAGGCGCCATTAAAGCTAAAACCACATCTTATACCGCTG
CCGATGGTACTACCAAGACTGCTGCCAATCAGCTGGGTGGAGTCGATGGA
AAAACCGAAGTGGTCACAATCGACGGAAAGACCTATCAAGCCTCCAAGGC
TGCTGGCCACGACTTCAAGGCCCAACCCGAACTGGCCGAGGCTGCTGCTA
AAACCACTGAAAACCCCCTGCAGAAAATTGACGCTGCCCTGGCCCAAGTG
GATGCCCTCCGCTCCGACCTCGGCGCTGTGCAAAACCGCTTCAACTCCGC
TATTACAAACCTCGGCAATACCGTCAATCAGCTCTCTGAAGCTAGGTCTC
GTATTGAGGATTCCGATTACGCTACCGAGGTCTCCCAGATGTCCCGTGCC
CAAATTCTCCAACAAGCCGGCACCTCCGTCCTCGCCCAAGCCAATCAGGT
GCCACAGAATGTGCTGAGC
SEQ ID NO:99 Honey Bee mellitin
ATGAAATTCTTAGTCAACGTTGCCCTTGTTTTTATGGTCGTATACATTTC
TTACATCTATGCG
SEQ ID NO:100 STF2.HA0s
ATGAAATTCTTAGTCAACGTTGCCCTTGTTTTTATGGTCGTATACATTTC
TTACATCTATGCGGCCCAGGTTATCAATACCAACTCCCTGTCGTTGCTCA
CCCAAAATAACCTTAATAAAAGCCAGAGCGCACTGGGAACCGCCATAGAA
CGCCTCTCAAGCGGCCTCCGGATCAATTCTGCAAAAGACGACGCCGCCGG
TCAGGCCATCGCAAACCGCTTTACCGCCAATATCAAGGGACTGACGCAGG
CTTCGAGGAATGCTAACGATGGAATAAGCATCGCTCAAACCACGGAGGGC
GCCCTGAACGAGATCAACAACAACCTACAGCGCGTCAGGGAGCTCGCAGT
GCAGTCCGCCAATTCGACCAACTCGCAGTCGGACCTGGACTCGATCCAAG
CCGAAATCACCCAGCGCCTGAATGAGATTGACCGGGTGAGCGGTCAGACA
CAGTTTAACGGCGTGAAGGTACTTGCACAGGATAACACACTTACGATACA
GGTGGGCGCCAACGATGGTGAAACCATAGACATTGATCTCAAACAGATTA
ACAGCCAGACGCTCGGGTTGGATAGCCTGAATGTGCAAAAGGCGTACGAC
GTGAAAGACACGGCGGTCACTACCAAAGCCTACGCTAACAATGGCACTAC
CTTGGATGTGAGCGGATTGGATGATGCAGCAATCAAGGCTGCTACCGGCG
GTACGAACGGAACCGCGTCCGTGACCGGCGGTGCCGTGAAGTTCGATGCT
GACAACAATAAGTATTTCGTCACCATTGGAGGCTTTACTGGCGCCGACGC
AGCAAAGAACGGCGACTATGAAGTGAACGTGGCAACCGATGGAACCGTGA
CGCTGGCCGCTGGTGCCACCAAGACCACCATGCCAGCCGGCGCCACAACT
AAGACCGAGGTGCAGGAGTTAAAGGACACCCCCGCGGTGGTTAGCGCAGA
TGCCAAAAACGCCTTGATCGCCGGCGGAGTGGATGCAACTGATGCTAATG
GTGCGGAGCTGGTTAAAATGTCGTATACAGACAAGAATGGTAAGACGATC
GAGGGCGGTTATGCCCTTAAGGCAGGAGATAAGTATTACGCTGCTGATTA
CGATGAGGCGACGGGAGCTATTAAGGCCAAGACAACGTCATACACGGCGG
CGGACGGAACGACTAAGACGGCTGCCAATCAGTTGGGAGGGGTTGACGGG
AAGACAGAGGTCGTTACGATCGATGGCAAGACATACAACGCTTCCAAGGC
CGCTGGCCACGATTTCAAAGCTCAACCCGAACTGGCCGAGGCCGCGGCGA
AAACAACTGAGAACCCGTTGCAGAAGATTGATGCGGCCCTGGCGCAAGTA
GATGCCCTGCGCTCAGACCTGGGCGCCGTTCAAAATCGATTCAATTCCGC
GATTACAAACCTGGGCAATACAGTAAACAATCTATCCGAGGCCAGATCCC
GCATTGAAGACTCCGACTACGCGACAGAAGTAAGTAACATGAGTCGTGCC
CAGATTCTGCAGCAGGCCGGCACTAGTGTCCTGGCCCAGGCCAATCAAGT
CCCGCAGAATGTGCTGAGCCTACTAGCATCAGGTTCCGGCTCAGGTTCCG
ACACCATTTGCATTGGATACCATGCAAACAACTCAACCGATACTGTTGAT
ACCGTCCTTGAGAAGAACGTTACCGTCACGCACTCGGTCAACCTATTAGA
GGATAGCCACAACGGAAAGCTGTGCCGTCTGAAAGGCATAGCGCCACTGC
AGCTCGGCAAATGTAACATCGCAGGTTGGCTCCTTGGTAACCCGGAGTGC
GACCCCCTCCTCCCTGTACGATCCTGGAGTTATATCGTGGAGACCCCCAA
TAGCGAGAACGGAATTTGCTACCCAGGAGATTTCATAGACTACGAGGAGT
TGCGCGAGCAGCTTTCGTCTGTGAGCAGCTTCGAAAGGTTCGAGATATTC
CCGAAGGAGAGCAGCTGGCCGAATCATAACACTAACGGTGTGACAGCCGC
CTGCAGTCATGAAGGAAAGAGTTCATTCTATCGCAACCTGCTGTGGTTGA
CGGAGAAAGAGGGCAGCTACCCTAAGTTGAAGAACTCCTATGTGAACAAA
AAAGGCAAGGAGGTTCTGGTGCTGTGGGGCATACACCACCCCCCCAATAG
CAAGGAGCAGCAGAATCTGTACCAAAACGAGAATGCCTATGTGAGCGTGG
TCACTAGTAACTATAACCGTCGGTTCACTCCCGAGATCGCCGAGCGTCCG
AAGGTGAGGGACCAGGCAGGCCGGATGAACTACTACTGGACCCTATTGAA
GCCAGGGGACACGATTATCTTCGAGGCAAACGGAAACCTCATAGCGCCGA
TGTACGCCTTCGCCCTGAGCCGTGGCTTTGGATCGGGGATCATCACGTCT
AACGCCTCGATGCACGAATGTAATACCAAATGCCAGACCCCACTGGGTGC
TATCAACTCGTCCTTACCCTATCAAAATATACATCCGGTCACCATAGGCG
AGTGTCCCAAATATGTCAGATCCGCCAAGTTGCGGATGGTGACCGGCCTC
CGCAATATTCCTAGTATTCAGTCACGCGGCTTGTTCGGCGCCATCGCTGG
TTTCATCGAAGGCGGGTGGACAGGCATGATTGATGGCTGGTATGGCTATC
ACCACCAGAACGAGCAGGGCTCGGGCTACGCGGCTGACCAGAAGTCGACT
CAGAATGCCATCAATGGCATCACGAATAAGGTGAACACGGTCATTGAAAA
GATGAACATTCAATTTACAGCCGTAGGAAAAGAGTTTAATAAACTGGAAA
AAAGAATGGAGAATCTGAATAAGAAGGTGGACGACGGATTTTTGGACATC
TGGACGTACAACGCCGAGCTGCTGGTTCTGCTGGAAAATGAGCGAACACT
GGATTTTCATGATTCTAACGTAAAGAATCTGTACGAGAAGGTGAAGTCCC
AACTAAAGAATAATGCCAAGGAAATCGGAAATGGATGCTTTGAGTTTTAC
CACAAGTGCGATAATGAGTGCATGGAATCCGTGCGAAATGGTACATACGA
TTACCCAAAGTACTCCGAAGAATCCAAGCTAAATCGCGAAAAGGTTGATG
GTGTTAAACTTGAATCCATGGGTATTTACCAACACCATCATCACCACCAT
TAATAG
SEQ ID NO:101 FOR PRIMER
AGTCGCTGAGCCTACTAGCATCAGGTTCCGGCTCAGGTTCCGACACCATT
TGCATTGGATACCATGC
SEQ ID NO:102 REV PRIMER
AGTCGCATGCCTATTAATGGTGGTGATGATGGTGTTGGTAAATACCCATG
GATTC
SEQ ID NO:103 HA0s PR8
GACACCATTTGCATTGGATACCATGCAAACAACTCAACCGATACTGTTGA
TACCGTCCTTGAGAAGAACGTTACCGTCACGCACTCGGTCAACCTATTAG
AGGATAGCCACAACGGAAAGCTGTGCCGTCTGAAAGGCATAGCGCCACTG
CAGCTCGGCAAATGTAACATCGCAGGTTGGCTCCTTGGTAACCCGGAGTG
CGACCCCCTCCTCCCTGTACGATCCTGGAGTTATATCGTGGAGACCCCCA
ATAGCGAGAACGGAATTTGCTACCCAGGAGATTTCATAGACTACGAGGAG
TTGCGCGAGCAGCTTTCGTCTGTGAGCAGCTTCGAAAGGTTCGAGATATT
CCCGAAGGAGAGCAGCTGGCCGAATCATAACACTAACGGTGTGACAGCCG
CCTGCAGTCATGAAGGAAAGAGTTCATTCTATCGCAACCTGCTGTGGTTG
ACGGAGAAAGAGGGCAGCTACCCTAAGTTGAAGAACTCCTATGTGAACAA
AAAAGGCAAGGAGGTTCTGGTGCTGTGGGGCATACACCACCCCCCCAATA
GCAAGGAGCAGCAGAATCTGTACCAAAACGAGAATGCCTATGTGAGCGTG
GTCACTAGTAACTATAACCGTCGGTTCACTCCCGAGATCGCCGAGCGTCC
GAAGGTGAGGGACCAGGCAGGCCGGATGAACTACTACTGGACCCTATTGA
AGCCAGGGGACACGATTATCTTCGAGGCAAACGGAAACCTCATAGCGCCG
ATGTACGCCTTCGCCCTGAGCCGTGGCTTTGGATCGGGGATCATCACGTC
TAACGCCTCGATGCACGAATGTAATACCAAATGCCAGACCCCACTGGGTG
CTATCAACTCGTCCTTACCCTATCAAAATATACATCCGGTCACCATAGGC
GAGTGTCCCAAATATGTCAGATCCGCCAAGTTGCGGATGGTGACCGGCCT
CCGCAATATTCCTAGTATTCAGTCACGCGGCTTGTTCGGCGCCATCGCTG
GTTTCATCGAAGGCGGGTGCACAGGCATGATTGATGGCTGGTATGGCTAT
CACCACCAGAACGAGCAGGGCTCGGGCTACGCGGCTGACCAGAAGTCGAC
TCAGAATGCCATCAATGGCATCACGAATAAGGTGAACACGGTCATTGAAA
AGATGAACATTCAATTTACAGCCGTAGGAAAAGAGTTTAATAAACTGGAA
AAAAGAATGGAGAATCTGAATAAGAAGGTGGACGACGGATTTTTGGACAT
CTGGACGTACAACGCCGAGCTGCTGGTTCTGCTGGAAAATGAGCGAACAC
TGGATTTTCATGATTCTAACGTAAAGAATCTGTACGAGAAGGTGAAGTCC
CAACTAAAGAATAATGCCAAGGAAATCGGAAATGGATGCTTTGAGTTTTA
CCACAAGTGCGATAATGAGTGCATGGAATCCGTGCGAAATGGTACATACG
ATTACCCAAAGTACTCCGAAGAATCCAAGCTAAATCGCGAAAAGGTTGAT
GGTGTTAAACTTGAATCCATGGGTATTTACCAACACCATCATCACCACCA
TTAATAG
SEQ ID NO:104 STF2.HA1-1
ATGAAATTCTTAGTCAACGTTGCCCTTGTTTTTATGGTCGTATACATTTC
TTACATCTATGCGGCCCAGGTTATCAATACCAACTCCCTGTCGTTGCTCA
CCCAAAATAACCTTAATAAAAGCCAGAGCGCACTGGGAACCGCCATAGAA
CGCCTCTCAAGCGGCCTCCGGATCAATTCTGCAAAAGACGACGCCGCCGG
TCAGGCCATCGCAAACCGCTTTACCGCCAATATCAAGGGACTGACGCAGG
CTTCGAGGAATGCTAACGATGGAATAAGCATCGCTCAAACCACGGAGGGC
GCCCTGAACGAGATCAACAACAACCTACAGCGCGTCAGGGAGCTCGCAGT
GCAGTCCGCCAATTCGACCAACTCGCAGTCGGACCTGGACTCGATCCAAG
CCGAAATCACCCAGCGCCTGAATGAGATTGACCGGGTGAGCGGTCAGACA
CAGTTTAACGGCGTGAAGGTACTTGCACAGGATAACACACTTACGATACA
GGTGGGCGCCAACGATGGTGAAACCATAGACATTGATCTCAAACAGATTA
ACAGCCAGACGCTCGGGTTGGATAGCCTGAATGTGCAAAAGGCGTACGAC
GTGAAAGACACGGCGGTCACTACCAAAGCCTACGCTAACAATGGCACTAC
CTTGGATGTGAGCGGATTGGATGATGCAGCAATCAAGGCTGCTACCGGCG
GTACGAACGGAACCGCGTCCGTGACCGGCGGTGCCGTGAAGTTCGATGCT
GACAACAATAAGTATTTCGTCACCATTGGAGGCTTTACTGGCGCCGACGC
AGCAAAGAACGGCGACTATGAAGTGAACGTGGCAACCGATGGAACCGTGA
CGCTGGCCGCTGGTGCCACCAAGACCACCATGCCAGCCGGCGCCACAACT
AAGACCGAGGTGCAGGAGTTAAAGGACACCCCCGCGGTGGTTAGCGCAGA
TGCCAAAAACGCCTTGATCGCCGGCGGAGTGGATGCAACTGATGCTAATG
GTGCGGAGCTGGTTAAAATGTCGTATACAGACAAGAATGGTAAGACGATC
GAGGGCGGTTATGCCCTTAAGGCAGGAGATAAGTATTACGCTGCTGATTA
CGATGAGGCGACGGGAGCTATTAAGGCCAAGACAACGTCATACACGGCGG
CGGACGGAACGACTAAGACGGCTGCCAATCAGTTGGGAGGGGTTGACGGG
AAGACAGAGGTCGTTACGATCGATGGCAAGACATACAACGCTTCCAAGGC
CGCTGGCCACGATTTCAAAGCTCAACCCGAACTGGCCGAGGCCGCGGCGA
AAACAACTGAGAACCCGTTGCAGAAGATTGATGCGGCCCTGGCGCAAGTA
GATGCCCTGCGCTCAGACCTGGGCGCCGTTCAAAATCGATTCAATTCCGC
GATTACAAACCTGGGCAATACAGTAAACAATCTATCCGAGGCCAGATCCC
GCATTGAAGACTCCGACTACGCGACAGAAGTAAGTAACATGAGTCGTGCC
CAGATTCTGCAGCAGGCCGGCACTAGTGTCCTGGCCCAGGCCAATCAAGT
CCCGCAGAATGTGCTGAGCCTACTAGCATCAGGTTCCGGCTCAGGTTCCA
GCCACAACGGAAAGCTGTGCCGTCTGAAAGGCATAGCGCCACTGCAGCTC
GGCAAATGTAACATCGCAGGTTGGCTCCTTGGTAACCCGGAGTGCGACCC
CCTCCTCCCTGTACGATCCTGGAGTTATATCGTGGAGACCCCCAATAGCG
AGAACGGAATTTGCTACCCAGCAGATTTCATAGACTACGAGGAGTTGCGC
GAGCAGCTTTCGTCTGTGAGCAGCTTCGAAAGGTTCGAGATATTCCCGAA
GGAGAGCAGCTGGCCGAATCATAACACTAACGGTGTGACAGCCGCCTGCA
GTCATGAAGGAAAGAGTTCATTCTATCGCAACCTGCTGTGGTTGACGGAG
AAAGAGGGCAGCTACCCTAAGTTGAAGAACTCCTATGTGAACAAAAAAGG
CAAGGAGGTTCTGGTGCTGTGGGGCATACACCACCCCCCCAATAGCAAGG
AGCAGCAGAATCTGTACCAAAACGAGAATGCCTATGTGAGCGTGGTCACT
AGTAACTATAACCGTCGGTTCACTCCCGAGATCGCCGAGCGTCCGAAGGT
GAGGGACCAGGCAGGCCGGATGAACTACTACTGGACCCTATTGAAGCCAG
GGGACACGATTATCTTCGAGGCAAACGGAAACCTCATAGCGCCGATGTAC
GCCTTCGCCCTGAGCCGTGGCTTTGGATCGGGGATCATCACGTCTAACGC
CTCGATGCACGAATGTAATACCAAATGCCAGACCCCACTGGGTGCTATCA
ACTCGTCCTTACCCTATCAAAATATACATCCGGTCACCATAGGCGAGTGT
CCCAAATATGTCAGACACCATCATCACCACCATTAATAG
SEQ ID NO:105 FOR PRIMER
AGTCGCTGAGCCTACTAGCATCAGGTTCCGGCTCAGGTTCCAGCCACAAC
GGAAAGCTGTGCCGTC
SEQ ID NO:106 REV PRIMER
AGTCGCATGCCTATTAATGGTGGTGATGATGGTGTCTGACATATTTGGGA
CACTCGCCTATGGTGAC
SEQ ID NO:107 STF2.HA1-2
ATGAAATTCTTAGTCAACGTTGCCCTTGTTTTTATGGTCGTATACATTTC
TTACATCTATGCGGCCCAGGTTATCAATACCAACTCCCTGTCGTTGCTCA
CCCAAAATAACCTTAATAAAAGCCAGAGCGCACTGGGAACCGCCATAGAA
CGCCTCTCAAGCGGCCTCCGGATCAATTCTGCAAAAGACGACGCCGCCGG
TCAGGCCATCGCAAACCGCTTTACCGCCAATATCAAGGGACTGACGCAGG
CTTCGAGGAATGCTAACGATGGGATAAGCATCGCTCAAACCACGGAGGGC
GCCCTGAACGAGATCAACAACAACCTACAGCGCGTCAGGGAGCTCGCAGT
GCAGTCCGCCAATTCGACCAACTCGCAGTCGGACCTGGACTCGATCCAAG
CCGAAATCACCCAGCGCCTGAACGAGATTGACCGGGTGAGCGGTCAGACA
CAGTTTAACGGCGTGAAGGTACTTGCGCAGGATAACACACTTACGATACA
GGTGGGCGCCAACGATGGTGAAACCATAGACATTGATCTCAAACAGATTA
ACAGCCAGACGCTCGGGTTGGATAGCCTGAATGTGCAAAAGGCGTACGAC
GTGAAAGACACGGCGGTCACTACCAAAGCCTACGCTAACAATGGCACTAC
CTTGGATGTGAGCGGATTGGATGATGCAGCAATCAAGGCTGCTACCGGCG
GTACGAACGGAACCGCGTCCGTGACCGGCGGTGCCGTGAAGTTCGATGCT
GACAACAATAAGTATTTCGTCACCATTGGAGGCTTTACTGGCGCCGACGC
AGCAAAGAACGGCGACTATGAAGTGAACGTGGCAACCGATGGAACCGTGA
CGCTGGCCGCTGGTGCCACCAAGACCACCATGCCAGCCGGCGCCACAACT
AAGACCGAGGTGCAGGAGTTAAAGGACACCCCCGCGGTGGTTAGCGCAGA
TGCCAAAAACGCGTTGATCGCCGGCGGAGTGGATGCAACTGATGCTAATG
GTGCGGAGCTGGTTAAAATGTCGTATACAGACAAGAATGGTAAGACGATC
GAGGGCGGTTATGCCCTTAAGGCAGGAGATAAGTATTACGCTGCTGATTA
CGATGAGGCGACGGGAGCTATTAAGGCCAAGACAACGTCATACACGGCGG
CGGACGGAACGACTAAGACGGCTGCCAATCAGTTGGGAGGGGTTGACGGG
AAGACAGAGGTCGTTACGATCGATGGCAAGACATACAACGCCTCCAAGGC
CGCTGGCCACGATTTCAAAGCTCAACCCGAACTGGCCGAGGCCGCGGCGA
AAACAACTGAGAACCCGTTGCAGAAGATTGATGCGGCCCTGGCGCAAGTA
GATGCCCTGCGCTCAGACCTGGGCGCCGTTCAAAATCGATTCAATTCCGC
GATTACAAACCTGGGCAATACAGTAAACAATCTATCCGAGGCCAGATCCC
GCATTGAAGACTCCGACTACGCGACAGAAGTAAGTAACATGAGTCGTGCC
CAGATTCTGCAGCAGGCCGGCACTAGTGTCCTGGCCCAGGCCAATCAAGT
CCCGCAGAATGTGCTGAGCCTACTAGCATCAGGTTCCGGCTCAGGTTCCA
AAGGCATAGCGCCACTGCAGCTCGGCAAATGTAACATCGCAGGTTGGCTC
CTTGGTAACCCGGAGTGCGACCCCCTCCTCCCTGTACGATCCTGGAGTTA
TATCGTGGAGACCCCCAATAGCGAGAACGGAATTTGCTACCCAGGAGATT
TCATAGACTACGAGGAGTTGCGCGAGCAGCTTTCGTCTGTGAGCAGCTTC
GAGAGGTTCGAAATCTTCCCGAAGGAGAGCAGCTGGCCGAATCATAACAC
TAACGGTGTGACAGCCGCCTGCAGTCATGAAGGAAAGAGTTCATTCTATC
GCAACCTGCTGTGGTTGACGGAGAAAGAGGGCAGCTACCCTAAGTTGAAG
AACTCCTATGTGAACAAAAAAGGCAAGGAGGTTCTGGTGCTGTGGGGCAT
ACACCACCCCCCCAATAGCAAGGAGCAGCAGAATCTGTACCAAAACGAGA
ATGCCTATGTGAGCGTGGTCACTAGTAACTATAACCGTCGGTTCACTCCC
GAGATCGCCGAGCGTCCGAAGGTGAGGGACCAGGCAGGCCGGATGAACTA
CTACTGGACCCTATTGAAGCCAGGGGACACGATTATCTTCGAGGCAAACG
GAAACCTCATAGCGCCGATGTACGCGTTCGCCCTGAGCCGTGGCTTTGGA
TCGGGGATCATCACGTCTCACCATCATCACCACCATTAATAG
SEQ ID NO:108 FOR PRIMER
AGTCGCTGAGCCTACTAGCATCAGGTTCCGGCTCAGGTTCCAAAGGCATA
GCGCCACTGCAGCTCG
SEQ ID NO:109 REV PRIMER
AGTCGCATGCCTATTAATGGTGGTGATGATGGTGAGACGTGATGATCCCC
GATCCAAAGCCACGGCTCAG
SEQ ID NO:110 STF2.HA1-2mut
ATGAAATTCTTAGTCAACGTTGCCCTTGTTTTTATGGTCGTATACATTTC
TTACATCTATGCGGCCCAGGTTATCAATACCAACTCCCTGTCGTTGCTCA
CCCAAAATAACCTTAATAAAAGCCAGAGCGCACTGGGAACCGCCATAGAA
CGCCTCTCAAGCGGCCTCCGGATCAATTCTGCAAAAGACGACGCCGCCGG
TCAGGCCATCGCAAACCGCTTTACCGCCAATATCAAGGGACTGACGCAGG
CTTCGAGGAATGCTAACGATGGAATAAGCATCGCTCAAACCACGGAGGGC
GCCCTGAACGAGATCAACAACAACCTACAGCGCGTCAGGGAGCTCGCAGT
GCAGTCCGCCAATTCGACCAACTCGCAGTCGGACCTGGACTCGATCCAAG
CCGAAATCACCCAGCGCCTGAATGAGATTGACCGGGTGAGCGGTCAGACA
CAGTTTAACGGCGTGAAGGTACTTGCACAGGATAACACACTTACGATACA
GGTGGGCGCCAACGATGGTGAAACCATAGACATTGATCTCAAACAGATTA
ACAGCCAGACGCTCGGGTTGGATAGCCTGAATGTGCAAAAGGCGTACGAC
GTGAAAGACACGGCGGTCACTACCAAAGCCTACGCTAACAATGGCACTAC
CTTGGATGTGAGCGGATTGGATGATGCAGCAATCAAGGCTGCTACCGGCG
GTACGAACGGAACCGCGTCCGTGACCGGCGGTGCCCTGAAGTTCGATGCT
GACAACAATAAGTATTTCGTCACCATTGGAGGCTTTACTGGCGCCGACGC
AGCAAAGAACGGCGACTATGAAGTGAACGTGGCAACCGATGGAACCGTGA
CGCTGGCCGCTGGTGCCACCAAGACCACCATGCCAGCCGGCGCCACAACT
AAGACCGAGGTGCAGGAGTTAAAGGACACCCCCGCGGTGGTTAGCGCAGA
TGCCAAAAACGCGTTGATCGCCGGCGGAGTGGATGCAACTGATGCTAATG
GTGCGGAGCTGGTTAAAATGTCGTATACAGACAAGAATGGTAAGACGATC
GAGGGCGGTTATGCCCTTAAGGCAGGAGATAAGTATTACGCTGCTGATTA
CGATGAGGCGACGGGAGCTATTAAGGCCAAGACAACGTCATACACGGCGG
CGGACGGAACGACTAAGACGGCTGCCAATCAGTTGGGAGGGGTTGACGGG
AAGACAGAGGTCGTTACGATCGATGGCAAGACATACAACGCCTCCAAGGC
CGCTGGCCACGATTTCAAAGCTCAACCCGAACTGGCCGAGGCCGCGGCGA
AAACAACTGAGAACCCGTTGCAGAAGATTGATGCGGCCCTGGCGCAAGTA
GATGCCCTGCGCTCAGACCTGGGCGCCGTTCAAAATCGATTCAATTCCGC
GATTACAAACCTGGGCAATACAGTAAACAATCTATCCGAGGCCAGATCCC
GCATTGAAGACTCCGACTACGCGACAGAAGTAAGTAACATGAGTCGTGCC
CAGATTCTGCAGCAGGCCGGCACTAGTGTCCTGGCCCAGGCCAATCAAGT
CCCGCAGAATGTGCTGAGCCTGCTGGCTTCTGGATCTGGATCTGGTTCTA
AAGGCGCTGCCCCTCTGCAACTCGGCAAGTGCAATATTGCGGGGTGGCTG
TTGGGCAACCCAGAATGTGACCCCCTCCTGCCCGTCCGTTCTTGGTCTGA
CATCGCTGAAACACCTAACTCCGAGAACGGCATCTGTTACCCGGGCGACT
TCATTGACTACGAGGAGCTCCGCGAACAGCTGTCTTCTGTCTCTTCTTTC
GAACGTTTCGAAATTTTCCCAAAGGAATCCTCCTGGCCAAACCATAACAC
CAACGGAGTGACCGCCGCCTGTAGCCATGAGGGCAAGTCTTCTTTCTACC
GTAATCTGCTGTGGCTGACTGAAAAAGAGGGTTCTTATCCCAAACTGAAG
AACTCTTATGTCAACAAGAAGGGCAAAGAGGTCCTGGTGCTGTGGGGTAT
CCACCACCCCCCCAACTCCAAGGAGCAGCAGAATCTGTACCAAAACGAAA
ATGCTTACGTGTCTGTCGTGACATCTAACTACAACCGGCGCTTCACGCCC
GAAATCGCCGAGCGTCCCAAAGTGCGCGATCAGGCCGGAAGGATGAACTA
CTACTGGACCCTGCTCAAACCCGGAGATACCATCATATTCGAAGCCAATG
GCAATCTCATCGCTCCCATGTATGCTTTCGCTCTCTCTCGCGGATTCGGT
TCCGGCATAATCACTAGCCACCACCACCACCACCACTAATAG
SEQ ID NO:111 HA1-2mut
AAGGCGCTGCCCCTCTGCAACTCGGCAAGTGCAATATTGCGGGGTGGCTG
TTGGGCAACCCAGAATGTGACCCCCTCCTGCCCGTCCGTTCTTGGTCTGA
CATCGCTGAAACACCTAACTCCGAGAACGGCATCTGTTACCCGGGCGACT
TCATTGACTACGAGGAGCTCCGCGAACAGCTGTCTTCTGTCTCTTCTTTC
GAACGTTTCGAAATTTTCCCAAAGGAATCCTCCTGGCCAAACCATAACAC
CAACGGAGTGACCGCCGCCTGTAGCCATGAGGGCAAGTCTTCTTTCTACC
GTAATCTGCTGTGGCTGACTGAAAAAGAGGGTTCTTATCCCAAACTGAAG
AACTCTTATGTCAACAAGAAGGGCAAAGAGGTCCTGGTGCTGTGGGGTAT
CCACCACCCCCCCAACTCCAAGGAGCAGCAGAATCTGTACCAAAACGAAA
ATGCTTACGTGTCTGTCGTGACATCTAACTACAACCGGCGCTTCACGCCC
GAAATCGCCGAGCGTCCCAAAGTGCGCGATCAGGCCGGAAGGATGAACTA
CTACTGGACCCTGCTCAAACCCGGAGATACCATCATATTCGAAGCCAATG
GCAATCTCATCGCTCCCATGTATGCTTTCGCTCTCTCTCGCGGATTCGGT
TCCGGCATAATCACTAGCCACCACCACCACCACCACTAATAG
SEQ ID NO:112 STF2.HA1-3
ATGAAATTCTTAGTCAACGTTGCCCTTGTTTTTATGGTCGTATACATTTC
TTACATCTATGCGGCCCAGGTTATCAATACCAACTCCCTGTCGTTGCTCA
CCCAAAATAACCTTAATAAAAGCCAGAGCGCACTGGGAACCGCCATAGAA
CGCCTCTCAAGCGGCCTCCGGATCAATTCTGCAAAAGACGACGCCGCCGG
TCAGGCCATCGCAAACCGCTTTACCGCCAATATCAAGGGACTGACGCAGG
CTTCGAGGAATGCTAACGATGGGATAAGCATCGCTCAAACCACGGAGGGC
GCCCTGAACGAGATCAACAACAACCTACAGCGCGTCAGGGAGCTCGCAGT
GCAGTCCGCCAATTCGACCAACTCGCAGTCGGACCTGGACTCGATCCAAG
CCGAAATCACCCAGCGCCTGAACGAGATTGACCGGGTGAGCGGTCAGACA
CAGTTTAACGGCGTGAAGGTACTTGCGCAGGATAACACACTTACGATACA
GGTGGGCGCCAACGATGGTGAAACCATAGACATTGATCTCAAACAGATTA
ACAGCCAGACGCTCGGGTTGGATAGCCTGAATGTGCAAAAGGCGTACGAC
GTGAAAGACACGGCGGTCACTACCAAAGCCTACGCTAACAATGGCACTAC
CTTGGATGTGAGCGGATTGGATGATGCAGCAATCAAGGCTGCTACCGGCG
GTACGAACGGAACCGCGTCCGTGACCGGCGGTGCCGTGAAGTTCGATGCT
GACAACAATAAGTATTTCGTCACCATTGGAGGCTTTACTGGCGCCGACGC
AGCAAAGAACGGCGACTATGAAGTGAACGTGGCAACCGATGGAACCGTGA
CGCTGGCCGCTGGTGCCACCAAGACCACCATGCCAGCCGGCGCCACAACT
AAGACCGAGGTGCAGGAGTTAAAGGACACCCCCGCGGTGGTTAGCGCAGA
TGCCAAAAACGCGTTGATCGCCGGCGGAGTGGATGCAACTGATGCTAATG
GTGCGGAGCTGGTTAAAATGTCGTATACAGACAAGAATGGTAAGACGATC
GAGGGCGGTTATGCCCTTAAGGCAGGAGATAAGTATTACGCTGCTGATTA
CGATGAGGCGACGGGAGCTATTAAGGCCAAGACAACGTCATACACGGCGG
CGGACGGAACGACTAAGACGGCTGCCAATCAGTTGGGAGGGGTTGACGGG
AAGACAGAGGTCGTTACGATCGATGGCAAGACATACAACGCCTCCAAGGC
CGCTGGCCACGATTTCAAAGCTCAACCCGAACTGGCCGAGGCCGCGGCGA
AAACAACTGAGAACCCGTTGCAGAAGATTGATGCGGCCCTGGCGCAAGTA
GATGCCCTGCGCTCAGACCTGGGCGCCGTTCAAAATCGATTCAATTCCGC
GATTACAAACCTGGGCAATACAGTAAACAATCTATCCGAGGCCAGATCCC
GCATTGAAGACTCCGACTACGCGACAGAAGTAAGTAACATGAGTCGTGCC
CAGATTCTGCAGCAGGCCGGCACTAGTGTCCTGGCCCAGGCCAATCAAGT
CCCGCAGAATGTGCTGAGCCTACTAGCATCAGGTTCCGGCTCAGGTTCCA
ATAGCGAGAACGGAATTTGCTACCCAGGAGATTTCATAGACTACGAGGAG
TTGCGCGAGCAGCTTTCGTCTGTGAGCAGCTTCGAGAGGTTCGAAATCTT
CCCGAAGGAGAGCAGCTGGCCGAATCATAACACTAACGGTGTGACAGCCG
CCTGCAGTCATGAAGGAAAGAGTTCATTCTATCGCAACCTGCTGTGGTTG
ACGGAGAAGGAGGGCAGCTACCCTAAGCTGAAGAACTCCTATGTGAACAA
AAAAGGCAAGGAGGTTCTGGTGCTGTGGGGCATACACCACCCCCCCAATA
GCAAGGAGCAGCAGAATCTGTACCAAAACGAGAATGCCTATGTGAGCGTG
GTCACTAGTAACTATAACCGTCGGTTCACTCCCGAGATCGCCGAGCGTCC
GAAGGTGAGGGACCAGGCAGGCCGGATGAACTACTACTGGACCCTATTGA
AGCCAGGGGACACGATTATCTTCGAGGCAAACGGAAACCTCATAGCGCCG
ATGTACGCCTTCGCCCTGAGCCGTGGCCACCATCATCACCACCATTAATA
G
SEQ ID NO:113 FOR PRIMER
AGTCGCTGAGCCTACTAGCATCAGGTTCCGGCTCAGGTTCCAATAGCGAG
AACGGAATTTGCTACC
SEQ ID NO:114 REV PRIMER
AGTCGCATGCCTATTAATGGTGGTGATGATGGTGGCCACGGCTCAGGGCG
AAGG
SEQ ID NO:115 STF2.HA1-3mut
ATGAAATTCTTAGTCAACGTTGCCCTTGTTTTTATGGTCGTATACATTTC
TTACATCTATGCGGCCCAGGTTATCAATACCAACTCCCTGTCGTTGCTCA
CCCAAAATAACCTTAATAAAAGCCAGAGCGCACTGGGAACCGCCATAGAA
CGCCTCTCAAGCGGCCTCCGGATCAATTCTGCAAAAGACGACGCCGCCGG
TCAGGCCATCGCAAACCGCTTTACCGCCAATATCAAGGGACTGACGCAGG
CTTCGAGGAATGCTAACGATGGAATAAGCATCGCTCAAACCACGGAGGGC
GCCCTGAACGAGATCAACAACAACCTACAGCGCGTCAGGGAGCTCGCAGT
GCAGTCCGCCAATTCGACCAACTCGCAGTCGGACCTGGACTCGATCCAAG
CCGAAATCACCCAGCGCCTGAATGAGATTGACCGGGTGAGCGGTCAGACA
CAGTTTAACGGCGTGAAGGTACTTGCACAGGATAACACACTTACGATACA
GGTGGGCGCCAACGATGGTGAAACCATAGACATTGATCTCAAACAGATTA
ACAGCCAGACGCTCGGGTTGGATAGCCTGAATGTGCAAAAGGCGTACGAC
GTGAAAGACACGGCGGTCACTACCAAAGCCTACGCTAACAATGGCACTAC
CTTGGATGTGAGCGGATTGGATGATGCAGCAATCAAGGCTGCTACCGGCG
GTACGAACGGAACCGCGTCCGTGACCGGCGGTGCCGTGAAGTTCGATGCT
GACAACAATAAGTATTTCGTCACCATTGGAGGCTTTACTGGCGCCGACGC
AGCAAAGAACGGCGACTATGAAGTGAACGTGGCAACCGATGGAACCGTGA
CGCTGGCCGCTGGTGCCACCAAGACCACCATGCCAGCCGGCGCCACAACT
AAGACCGAGGTGCAGGAGTTAAAGGACACCCCCGCGGTGGTTAGCGCAGA
TGCCAAAAACGCGTTGATCGCCGGCGGAGTGGATGCAACTGATGCTAATG
GTGCGGAGCTGGTTAAAATGTCGTATACAGACAAGAATGGTAAGACGATC
GAGGGCGGTTATGCCCTTAAGGCAGGAGATAAGTATTACGCTGCTGATTA
CGATGAGGCGACGGGAGCTATTAAGGCCAAGACAACGTCATACACGGCGG
CGGACGGAACGACTAAGACGGCTGCCAATCAGTTGGGAGGGGTTGACGGG
AAGACAGAGGTCGTTACGATCGATGGCAAGACATACAACGCCTCCAAGGC
CGCTGGCCACGATTTCAAAGCTCAACCCGAACTGGCCGAGGCCGCGGCGA
AAACAACTGAGAACCCGTTGCAGAAGATTGATGCGGCCCTGGCGCAAGTA
GATGCCCTGCGCTCAGACCTGGGCGCCGTTCAAAATCGATTCAATTCCGC
GATTACAAACCTGGGCAATACAGTAAACAATCTATCCGAGGCCAGATCCC
GCATTGAAGACTCCGACTACGCGACAGAAGTAAGTAACATGAGTCGTGCC
CAGATTCTGCAGCAGGCCGGCACTAGTGTCCTGGCCCAGGCCAATCAAGT
CCCGCAGAATGTGCTGAGCCTGCTGGCTTCTGGATCTGGATCTGGTTCTA
ACTCCGAGAACGAAATCTGTTACCCGGGCGACTTCATTGACAAAGAGGAG
CTCCGCGAACAGCTGTCTTCTGTCTCTTCTTTCGAACGTTTCGAAATTTT
CCCAAAGGAATCCTCCTGGCCAAACCATAACACCAACGGAGTGACCGCCG
CCTGTAGCCATGAGGGCAAGTCTTCTTTCTACCGTAATCTGCTGTGGCTG
ACTGAAAAAGAGGGTTCTTATCCCAAACTGAAGAACTCTTATGTCAACAA
GAAGGGCAAAGAGGTCCTGGTGCTGTGGGGTATCCACCACCCCCCCAACT
CCAAGGAGCAGCAGAATCTGTACCAAAACGAAAATGCTTACGTGTCTGTC
GTGACATCTAACTACAACCGGCGCTTCACGCCCGAAATCGCCGAGCGTCC
CAAAGTGCGCGATCAGGCCGGAAGGATGAACTACTACTGGACCCTGCTCA
AACCCGGAGATACCATCATATTCGAAGCCAATGGCAATCTCATCGCTCCC
ATGTATGCTGCTGCTCTCTCTCGCGGACACCACCACCACCACCACTAATA
G
SEQ ID NO:116 HA1-3mut PR8
AACTCCGAGAACGAAATCTGTTACCCGGGCGACTTCATTGACAAAGAGGA
GCTCCGCGAACAGCTGTCTTCTGTCTCTTCTTTCGAACGTTTCGAAATTT
TCCCAAAGGAATCCTCCTGGCCAAACCATAACACCAACGGAGTGACCGCC
GCCTGTAGCCATGAGGGCAAGTCTTCTTTCTACCGTAATCTGCTGTGGCT
GACTGAAAAAGAGGGTTCTTATCCCAAACTGAAGAACTCTTATGTCAACA
AGAAGGGCAAAGAGGTCCTGGTGCTGTGGGGTATCCACCACCCCCCCAAC
TCCAAGGAGCAGCAGAATCTGTACCAAAACGAAAATGCTTACGTGTCTGT
CGTGACATCTAACTACAACCGGCGCTTCACGCCCGAAATCGCCGAGCGTC
CCAAAGTGCGCGATCAGGCCGGAAGGATGAACTACTACTGGACCCTGCTC
AAACCCGGAGATACCATCATATTCGAAGCCAATGGCAATCTCATCGCTCC
CATGTATGCTGCTGCTCTCTCTCGCGGACACCACCACCACCACCACTAAT
AG
SEQ ID NO:117 ngSTF2.HA0s
ATGAAATTCTTAGTCAACGTTGCCCTTGTTTTTATGGTCGTATACATTTC
TTACATCTATGCGGCCCAAGTGATCAACACCAACTCCCTGTCCCTGCTCA
CTCAAAACAACCTCCAGAAATCTCAGTCTGCTCTCGGTACTGCTATCGAG
CGTCTCTCCTCCGGCCTGAGGATCAACTCCGCTAAAGATGACGCCGCCGG
ACAAGCTATCGCTAACCGCTTTACTGCCAACATTAAAGGCCTGACCCAAG
CCTCTAGGAACGCCAATGATGGCATTTCTATCGCTCAAACCACCGAAGGC
GCCCTGAACGAAATCAATAATAACCTGCAACGTGTCCGCGAACTCGCCGT
CCAGTCCGCCCAATCTACCAACTCTCAGTCTGACCTGGACTCTATCCAAG
CTGAGATCACCCAAAGGCTCAACGAGATCGATCGTGTGTCTGGTCAAACT
CAGTTTAACGGCGTCAAAGTGCTGGCTCAAGACAACACACTCACCATCCA
AGTAGGAGCCAATGACGGCGAGACAATCGATATCGACCTGAAGCAGATCA
ATTCTCAAACTCTGGGCCTGGACTCCCTGAACGTCCAAAAGGCTTACGAC
GTGAAGGACACCGCTGTGACAACCAAAGCCTATGCTAATCAAGGAACAAC
CCTGGACGTGTCCGGACTCGATGACGCCGCTATCAAGGCCGCTACTGGCG
GCACTCAGGGAACTGCCTCTGTGACCGGAGGCGCTGTGAAGTTCGACGCC
GATAACAACAAATACTTCGTCACTATTGGTGGTTTCACTGGCGCTGACGC
CGCTAAGAACGGTGACTACGAGGTCAACGTCGCCACTGACGGAACAGTGA
CACTGGCCGCTGGCGCTACCAAGACCACAATGCCTGCTGGTGCTACTACT
AAGACAGAGGTGCAGGAACTCAAGGACACCCCTGCCGTGGTGTCCGCCGA
TGCTAAGAACGCTCTCATTGCTGGTGGTGTCGACGCTACGGACGCCAACG
GAGCCGAGCTTGTGAAAATGTCCTACACCGACAAGAACGGAAAGACTATC
GAGGGAGGTTACGCTCTGAAGGCTGGCGATAAGTACTACGCCGCTGATTA
TGACGAAGCTACAGGCGCCATTAAAGCTAAAACCACATCTTATACCGCTG
CCGATGGTACTACCAAGACTGCTGCCAATCAGCTGGGTGGAGTCGATGGA
AAAACCGAAGTGGTCACAATCGACGGAAAGACCTATCAAGCCTCCAAGGC
TGCTGGCCACGACTTCAAGGCCCAACCCGAACTGGCCGAGGCTGCTGCTA
AAACCACTGAAAACCCCCTGCAGAAAATTGACGCTGCCCTGGCCCAAGTG
GATGCCCTCCGCTCCGACCTCGGCGCTGTGCAAAACCGCTTCAACTCCGC
TATTACAAACCTCGGCAATACCGTCAATCAACTCTCTGAAGCTAGGTCTC
GTATTGAGGATTCCGATTACGCTACCGAGGTCTCCCAGATGTCCCGTGCC
CAAATTCTCCAACAAGCCGGCACCTCCGTCCTCGCCCAAGCCAATCAGGT
GCCACAGAATGTGCTGAGCCTGCTGGCTTCTGGATCTGGATCTGGTTCTG
ACACCATCTGCATTGGCTACCATGCCCAGCAGTCTACAGATACAGTCGAT
ACCGTCCTGGAGAAACAAGTCACCGTCACGCACTCCGTGAACCTCCTGGA
GGACTCCCATAATGGCAAATTGTGTCGGCTGAAAGGCATCGCCCCTCTGC
AACTCGGCAAGTGCAATATTGCGGGGTGGCTGTTGGGCAACCCAGAATGT
GACCCCCTCCTGCCCGTCCGTTCTTGGTCTTACATCGTGGAAACACCTAA
CTCCGAGAACGGCATCTGTTACCCGGGCGACTTCATTGACTACGAGGAGC
TCCGCGAACAGCTGTCTTCTGTCTCTTCTTTCGAACGTTTCGAATTTTCC
CAAAGGAATCCTCCTGGCCAAACCATAACACCAACGGAGTGACCGCCGCC
TGTAGCCATGAGGGCAAGTCTTCTTTCTACCGTAATCTGCTGTGGCTGAC
TGAAAAAGAGGGTTCTTATCCCAAACTGAAGAACTCTTATGTCAACAAGA
AGGGCAAAGAGGTCCTGGTGCTGTGGGGTATCCACCACCCCCCCAACTCC
AAGGAGCAGCAGAATCTGTACCAAAACGAAAATGCTTACGTGTCTGTCGT
GACATCTAACTACAACCGGCGCTTCACGCCCGAAATCGCCGAGCGTCCCA
AAGTGCGCGATCAGGCCGGAAGGATGAACTACTACTGGACCCTGCTCAAA
CCCGGAGATACCATCATATTCGAAGCCAATGGCAATCTCATCGCTCCCAT
GTATGCTTTCGCTCTCTCTCGCGGATTCGGTTCCGGCATAATCACTAGCC
AAGCCTCCATGCACGAGTGCAATACCAAGTGTCAAACTCCACTGGGAGCC
ATTCAAAGCTCCCTGCCCTACCAAAACATCCATCCTGTGACCATTGGAGA
GTGCCCTAAATACGTGCGCAGCGCGAAACTGCGCATGGTGACCGGTCTCC
GCAATATACCCTCCATACAATCGCGCGGCCTGTTTGGTGCTATCGCTGGC
TTTATCGAGGGAGGATGGACTGGAATGATCGACGGCTGGTATGGCTATCA
TCATCAAAACGAACAGGGTTCCGGCTACGCCGCTGACCAAAAGTCCACTC
AAAACGCCATTAACGGTATTACAAACAAAGTAAACACCGTGATAGAGAAA
ATGAATATCCAATTCACTGCCGTGGGCAAAGAGTTTAACAAGCTGGAGAA
GCGCATGGAAAATCTGAACAAAAAAGTCGATGATGGCTTCCTCGACATCT
GGACTTACAACGCCGAACTCCTCGTGCTGCTCGAAAACGAGAGGACTCTG
GACTTCCACGACTCCAACGTGAAGAACCTGTACGAGAAAGTCAAATCCCA
ACTCAAGAACAACGCCAAAGAAATCGGCAACGGCTGCTTCGAGTTCTACC
ACAAATGTGATAACGAGTGTATGGAATCCGTACGGCAAGGCACTTACGAC
TACCCCAAATACAGCGAAGAGAGCAAATTGAACCGCGAGAAAGTGGACGG
CGTGAAACTGGAGTCCATGGGCATCTATCAGCACCACCACCACCACCACT
AATAG
SEQ ID NO:118 ngHA0s
GACACCATCTGCATTGGCTACCATGCCCAGCAGTCTACAGATACAGTCGA
TACCGTCCTGGAGAAACAAGTCACCGTCACGCACTCCGTGAACCTCCTGG
AGGACTCCCATAATGGCAAATTGTGTCGGCTGAAAGGCATCGCCCCTCTG
CAACTCGGCAAGTGCAATATTGCGGGGTGGCTGTTGGGCAACCCAGAATG
TGACCCCCTCCTGCCCGTCCGTTCTTGGTCTTACATCGTGGAAACACCTA
ACTCCGAGAACGGCATCTGTTACCCGGGCGACTTCATTGACTACGAGGAG
CTCCGCGAACAGCTGTCTTCTGTCTCTTCTTTCGAACGTTTCGAAATTTT
CCCAAAGGAATCCTCCTGGCCAAACCATAACACCAACGGAGTGACCGCCG
CCTGTAGCCATGAGGGCAAGTCTTCTTTCTACCGTAATCTGCTGTGGCTG
ACTGAAAAAGAGGGTTCTTATCCCAAACTGAAGAACTCTTATGTCAACAA
GAAGGGCAAAGAGGTCCTGGTGCTGTGGGGTATCCACCACCCCCCCAACT
CCAAGGAGCAGCAGAATCTGTACCAAAACGAAAATGCTTACGTGTCTGTC
GTGACATCTAACTACAACCGGCGCTTCACGCCCGAAATCGCCGAGCGTCC
CAAAGTGCGCGATCAGGCCGGAAGGATGAACTACTACTGGACCCTGCTCA
AACCCGGAGATACCATCATATTCGAAGCCAATGGCAATCTCATCGCTCCC
ATGTATGCTTTCGCTCTCTCTCGCGGATTCGGTTCCGGCATAATCACTAG
CCAAGCCTCCATGCACGAGTGCAATACCAAGTGTCAAACTCCACTGGGAG
CCATTCAAAGCTCCCTGCCCTACCAAAACATCCATCCTGTGACCATTGGA
GAGTGCCCTAAATACGTGCGCAGCGCGAAACTGCGCATGGTGACCGGTCT
CCGCAATATACCCTCCATACAATCGCGCGGCCTGTTTGGTGCTATCGCTG
GCTTTATCGAGGGAGGATGGACTGGAATGATCGACGGCTGGTATGGCTAT
CATCATCAAAACGAACAGGGTTCCGGCTACGCCGCTGACCAAAAGTCCAC
TCAAAACGCCATTAACGGTATTACAAACAAAGTAAACACCGTGATAGAGA
AAATGAATATCCAATTCACTGCCGTGGGCAAAGAGTTTAACAAGCTGGAG
AAGCGCATGGAAAATCTGAACAAAAAAGTCGATGATGGCTTCCTCGACAT
CTGGACTTACAACGCCGAACTCCTCGTGCTGCTCGAAAACGAGAGGACTC
TGGACTTCCACGACTCCAACGTGAAGAACCTGTACGAGAAAGTCAAATCC
CAACTCAAGAACAACGCCAAAGAAATCGGCAACGGCTGCTTCGAGTTCTA
CCACAAATGTGATAACGAGTGTATGGAATCCGTACGGCAAGGCACTTACG
ACTACCCCAAATACAGCGAAGAGAGCAAATTGAACCGCGAGAAAGTGGAC
GGCGTGAAACTGGAGTCCATGGGCATCTATCAGCACCACCACCACCACCA
CTAATAG
SEQ ID NO:119 ngSTF2.HA1-1
ATGAAATTCTTAGTCAACGTTGCCCTTGTTTTTATGGTCGTATACATTTC
TTACATCTATGCGGCCCAAGTGATCAACACCAACTCCCTGTCCCTGCTCA
CTCAAAACAACCTCCAGAAATCTCAGTCTGCTCTCGGTACTGCTATCGAG
CGTCTCTCCTCCGGCCTGAGGATCAACTCCGCTAAAGATGACGCCGCCGG
ACAAGCTATCGCTAACCGCTTTACTGCCAACATTAAAGGCCTGACCCAAG
CCTCTAGGAACGCCAATGATGGCATTTCTATCGCTCAAACCACCGAAGGC
GCCCTGAACGAAATCAATAATAACCTGCAACGTGTCCGCGAACTCGCCGT
CCAGTCCGCCCAATCTACCAACTCTCAGTCTGACCTGGACTCTATCCAAG
CTGAGATCACCCAAAGGCTCAACGAGATCGATCGTGTGTCTGGTCAAACT
CAGTTTAACGGCGTCAAAGTGCTGGCTCAAGACAACACACTCACCATCCA
AGTAGGAGCCAATGACGGCGAGACAATCGATATCGACCTGAAGCAGATCA
ATTCTCAAACTCTGGGCCTGGACTCCCTGAACGTCCAAAAGGCTTACGAC
GTGAAGGACACCGCTGTGACAACCAAAGCCTATGCTAATCAAGGAACAAC
CCTGGACGTGTCCGGACTCGATGACGCCGCTATCAAGGCCGCTACTGGCG
GCACTCAGGGAACTGCCTCTGTGACCGGAGGCGCTGTGAAGTTCGACGCC
GATAACAACAAATACTTCGTCACTATTGGTGGTTTCACTGGCGCTGACGC
CGCTAAGAACGGTGACTACGAGGTCAACGTCGCCACTGACGGAACAGTGA
CACTGGCCGCTGGCGCTACCAAGACCACAATGCCTGCTGGTGCTACTACT
AAGACAGAGGTGCAGGAACTCAAGGACACCCCTGCCGTGGTGTCCGCCGA
TGCTAAGAACGCTCTCATTGCTGGTGGTQTCGACGCTACGGACGCCAACG
GAGCCGAGCTTGTGAAAATGTCCTACACCGACAAGAACGGAAAGACTATC
GAGGGAGGTTACGCTCTGAAGGCTGGCGATAAGTACTACGCCGCTGATTA
TGACGAAGCTACAGGCGCCATTAAAGCTAAAACCACATCTTATACCGCTG
CCGATGGTACTACCAAGACTGCTGCCAATCAGCTGGGTGGAGTCGATGGA
AAAACCGAAGTGGTCACAATCGACGGAAAGACCTATCAAGCCTCCAAGGC
TGCTGGCCACGACTTCAAGGCCCAACCCGAACTGGCCGAGGCTGCTGCTA
AAACCACTGAAAACCCCCTGCAGAAAATTGACGCTGCCCTGGCCCAAGTG
GATGCCCTCCGCTCCGACCTCGGCGCTGTGCAAAACCGCTTCAACTCCGC
TATTACAAACCTCGGCAATACCGTCAATCAGCTCTCTGAAGCTAGGTCTC
GTATTGAGGATTCCGATTACGCTACCGAGGTCTCCCAGATGTCCCGTGCC
CAAATTCTCCAACAAGCCGGCACCTCCGTCCTCGCCCAAGCCAATCAGGT
GCCACAGAATGTGCTGAGCCTGCTGGCTTCTGGATCTGGATCTGGTTCTT
CCCATAATGGCAAATTGTGTCGGCTGAAAGGCATCGCCCCTCTGCAACTC
GGCAAGTGCAATATTGCGGGGTGGCTGTTGGGCAACCCAGAATGTGACCC
CCTCCTGCCCGTCCGTTCTTGGTCTTACATCGTGGAAACACCTAACTCCG
AGAACGGCATCTGTTACCCGGGCGACTTCATTGACTACGAGGAGCTCCGC
GAACAGCTGTCTTCTGTCTCTTCTTTCGAACGTTTCGAAATTTTCCCAAA
GGAATCCTCCTGGCCAAACCATAACACCAACGGAGTGACCGCCGCCTGTA
GCCATGAGGGCAAGTCTTCTTTCTACCGTAATCTGCTGTGGCTGACTGAA
AAAGAGGGTTCTTATCCCAAACTGAAGAACTCTTATGTCAACAAGAAGGG
CAAAGAGGTCCTGGTGCTGTGGGGTATCCACCACCCCCCCAACTCCAAGG
AGCAGCAGAATCTGTACCAAAACGAAAATGCTTACGTGTCTGTCGTGACA
TCTAACTACAACCGGCGCTTCACGCCCGAAATCGCCGAGCGTCCCAAAGT
GCGCGATCAGGCCGGAAGGATGAACTACTACTGGACCCTGCTCAAACCCG
GAGATACCATCATATTCGAAGCCAATGGCAATCTCATCGCTCCCATGTAT
GCTTTCGCTCTCTCTCGCGGATTCGGTTCCGGCATAATCACTAGCCAAGC
CTCCATGCACGAGTGCAATACCAAGTGTCAAACTCCACTGGGAGCCATTC
AAAGCTCCCTGCCCTACCAAAACATCCATCCTGTGACCATTGGAGAGTGC
CCTAAATACGTGCGCCACCACCACCACCACCACTAATAG
SEQ ID NO:120 ng HA1-1
TCCCATAATGGCAAATTGTGTCGGCTGAAAGGCATCGCCCCTCTGCAACT
CGGCAAGTGCAATATTGCGGGGTGGCTGTTGGGCAACCCAGAATGTGACC
CCCTCCTGCCCGTCCGTTCTTGGTCTTACATCGTGGAAACACCTAACTCC
GAGAACGGCATCTGTTACCCGGGCGACTTCATTGACTACGAGGAGCTCCG
CGAACAGCTGTCTTCTGTCTCTTCTTTCGAACGTTTCGAAATTTTCCCAA
AGGAATCCTCCTGGCCAAACCATAACACCAACGGAGTGACCGCCGCCTGT
AGCCATGAGGGCAAGTCTTCTTTCTACCGTAATCTGCTGTGGCTGACTGA
AAAAGAGGGTTCTTATCCCAAACTGAAGAACTCTTATGTCAACAAGAAGG
GCAAAGAGGTCCTGGTGCTGTGGGGTATCCACCACCCCCCCAACTCCAAG
GAGCAGCAGAATCTGTACCAAAACGAAAATGCTTACGTGTCTGTCGTGAC
ATCTAACTACAACCGGCGCTTCACGCCCGAAATCGCCGAGCGTCCCAAAG
TGCGCGATCAGGCCGGAAGGATGAACTACTACTGGACCCTGCTCAAACCC
GGAGATACCATCATATTCGAAGCCAATGGCAATCTCATCGCTCCCATGTA
TGCTTTCGCTCTCTCTCGCGGATTCGGTTCCGGCATAATCACTAGCCAAG
CCTCCATGCACGAGTGCAATACCAAGTGTCAAACTCCACTGGGAGCCATT
CAAAGCTCCCTGCCCTACCAAAACATCCATCCTGTGACCATTGGAGAGTG
CCCTAAATACGTGCGCCACCACCACCACCACCACTAATAG
SEQ ID NO:121 ngSTF2.HA1-2
ATGAAATTCTTAGTCAACGTTGCCCTTGTTTTTATGGTCGTATACATTTC
TTACATCTATGCGGCCCAAGTGATCAACACCAACTCCCTGTCCCTGCTCA
CTCAAAACAACCTCCAGAAATCTCAGTCTGCTCTCGGTACTGCTATCGAG
CGTCTCTCCTCCGGCCTGAGGATCAACTCCGCTAAAGATGACGCCGCCGG
ACAAGCTATCGCTAACCGCTTTACTGCCAACATTAAAGGCCTGACCCAAG
CCTCTAGGAACGCCAATGATGGCATTTCTATCGCTCAAACCACCGAAGGC
GCCCTGAACGAAATCAATAATAACCTGCAACGTGTCCGCGAACTCGCCGT
CCAGTCCGCCCAATCTACCAACTCTCAGTCTGACCTGGACTCTATCCAAG
CTGAGATCACCCAAAGGCTCAACGAGATCGATCGTGTGTCTGGTCAAACT
CAGTTTAACGGCGTCAAAGTGCTGGCTCAAGACAACACACTCACCATCCA
AGTAGGAGCCAATGACGGCGAGACAATCGATATCGACCTGAAGCAGATCA
ATTCTCAAACTCTGGGCCTGGACTCCCTGAACGTCCAAAAGGCTTACGAC
GTGAAGGACACCGCTGTGACAACCAAAGCCTATGCTAATCAAGGAACAAC
CCTGGACGTGTCCGGACTCGATGACGCCGCTATCAAGGCCGCTACTGGCG
GCACTCAGGGAACTGCCTCTGTGACCGGAGGCGCTGTGAAGTTCGACGCC
GATAACAACAAATACTTCGTCACTATTGGTGGTTTCACTGGCGCTGACGC
CGCTAAGAACGGTGACTACGAGGTCAACGTCGCCACTGACGGAACAGTGA
CACTGGCCGCTGGCGCTACCAAGACCACAATGCCTGCTGGTGCTACTACT
AAGACAGAGGTGCAGGAACTCAAGGACACCCCTGCCGTGGTGTCCGCCGA
TGCTAAGAACGCTCTCATTGCTGGTGGTGTCGACGCTACGGACGCCAACG
GAGCCGAGCTTGTGAAAATGTCCTACACCGACAAGAACGGAAAGACTATC
GAGGGAGGTTACGCTCTGAAGGCTGGCGATAAGTACTACGCCGCTGATTA
TGACGAAGCTACAGGCGCCATTAAAGCTAAAACCACATCTTATACCGCTG
CCGATGGTACTACCAAGACTGCTGCCAATCAGCTGGGTGGAGTCGATGGA
AAAACCGAAGTGGTCACAATCGACGGAAAGACCTATCAAGCCTCCAAGGC
TGCTGGCCACGACTTCAAGGCCCAACCCGAACTGGCCGAGGCTGCTGCTA
AAACCACTGAAAACCCCCTGCAGAAAATTGACGCTGCCCTGGCCCAAGTG
GATGCCCTCCGCTCCGACCTCGGCGCTGTGCAAAACCGCTTCAACTCCGC
TATTACAAACCTCGGCAATACCGTCAATCAGCTCTCTGAAGCTAGGTCTC
GTATTGAGGATTCCGATTACGCTACCGAGGTCTCCCAGATGTCCCGTGCC
CAAATTCTCCAACAAGCCGGCACCTCCGTCCTCGCCCAAGCCAATCAGGT
GCCACAGAATGTGCTGAGCCTACTAGCATCAGGTTCCGGCTCAGGTTCCA
AAGGCATAGCGCCACTGCAGCTCGGCAAATGTAACATCGCAGGTTGGCTC
CTTGGTAACCCGGAGTGCGACCCCCTCCTCCCTGTACGATCCTGGAGTTA
TATCGTGGAGACCCCCAATAGCGAGAACGGAATTTGCTACCCAGGAGATT
TCATAGACTACGAGGAGTTGCGCGAGCAGCTTTCGTCTGTGAGCAGCTTC
GAGAGGTTCGAAATCTTCCCGAAGGAGAGCAGCTGGCCGAATCATAACAC
TAACGGTGTGACAGCCGCCTGCAGTCATGAAGGAAAGAGTTCATTCTATC
GCAACCTGCTGTGGTTGACGGAGAAAGAGGGCAGCTACCCTAAGTTGAAG
AACTCCTATGTGAACAAAAAAGGCAAGGAGGTTCTGGTGCTGTGGGGCAT
ACACCACCCCCCCAATAGCAAGGAGCAGCAGAATCTGTACCAAAACGAGA
ATGCCTATGTGAGCGTGGTCACTAGTAACTATAACCGTCGGTTCACTCCC
GAGATCGCCGAGCGTCCGAAGGTGAGGGACCAGGCAGGCCGGATGAACTA
CTACTGGACCCTATTGAAGCCAGGGGACACGATTATCTTCGAGGCAAACG
GAAACCTCATAGCGCCGATGTACGCGTTCGCCCTGAGCCGTGGCTTTGGA
TCGGGGATCATCACGTCTCACCATCATCACCACCATTAATAG
SEQ ID NO:122 ng HA1-2
AAAGGCATAGCGCCACTGCAGCTCGGCAAATGTAACATCGCAGGTTGGCT
CCTTGGTAACCCGGAGTGCGACCCCCTCCTCCCTGTACGATCCTGGAGTT
ATATCGTGGAGACCCCCAATAGCGAGAACGGAATTTGCTACCCAGGAGAT
TTCATAGACTACGAGGAGTTGCGCGAGCAGCTTTCGTCTGTGAGCAGCTT
CGAAAGGTTCGAGATATTCCCGAAGGAGAGCAGCTGGCCGAATCATAACA
CTAACGGTGTGACAGCCGCCTGCAGTCATGAAGGAAAGAGTTCATTCTAT
CGCAACCTGCTGTGGTTGACGGAGAAAGAGGGCAGCTACCCTAAGTTGAA
GAACTCCTATGTGAACAAAAAAGGCAAGGAGGTTCTGGTGCTGTGGGGCA
TACACCACCCCCCCAATAGCAAGGAGCAGCAGAATCTGTACCAAAACGAG
AATGCCTATGTGAGCGTGGTCACTAGTAACTATAACCGTCGGTTCACTCC
CGAGATCGCCGAGCGTCCGAAGGTGAGGGACCAGGCAGGCCGGATGAACT
ACTACTGGACCCTATTGAAGCCAGGGGACACGATTATCTTCGAGGCAAAC
GGAAACCTCATAGCGCCGATGTACGCCTTCGCCCTGAGCCGTGGCTTTGG
ATCGGGGATCATCACGTCTCACCATCATCACCACCATTAATAG
SEQ ID NO:123 ngSTF2.HA1-2mut
ATGAAATTCTTAGTCAACGTTGCCCTTGTTTTTATGGTCGTATACATTTC
TTACATCTATGCGGCCCAAGTGATCAACACCAACTCCCTGTCCCTGCTCA
CTCAAAACAACCTCCAGAAATCTCAGTCTGCTCTCGGTACTGCTATCGAG
CGTCTCTCCTCCGGCCTGAGGATCAACTCCGCTAAAGATGACGCCGCCGG
ACAAGCTATCGCTAACCGCTTTACTGCCAACATTAAAGGCCTGACCCAAG
CCTCTAGGAACGCCAATGATGGCATTTCTATCGCTCAAACCACCGAAGGC
GCCCTGAACGAAATCAATAATAACCTGCAACGTGTCCGCGAACTCGCCGT
CCAGTCCGCCCAATCTACCAACTCTCAGTCTGACCTGGACTCTATCCAAG
CTGAGATCACCCAAAGGCTCAACGAGATCGATCGTGTGTCTGGTCAAACT
CAGTTTAACGGCGTCAAAGTGCTGGCTCAAGACAACACACTCACCATCCA
AGTAGGAGCCAATGACGGCGAGACAATCGATATCGACCTGAAGCAGATCA
ATTCTCAAACTCTGGGCCTGGACTCCCTGAACGTCCAAAAGGCTTACGAC
GTGAAGGACACCGCTGTGACAACCAAAGCCTATGCTAATCAAGGAACAAC
CCTGGACGTGTCCGGACTCGATGACGCCGCTATCAAGGCCGCTACTGGCG
GCACTCAGGGAACTGCCTCTGTGACCGGAGGCGCTGTGAAGTTCGACGCC
GATAACAACAAATACTTCGTCACTATTGGTGGTTTCACTGGCGCTGACGC
CGCTAAGAACGGTGACTACGAGGTCAACGTCGCCACTGACGGAACAGTGA
CACTGGCCGCTGGCGCTACCAAGACCACAATGCCTGCTGGTGCTACTACT
AAGACAGAGGTGCAGGAACTCAAGGACACCCCTGCCGTGGTGTCCGCCGA
TGCTAAGAACGCTCTCATTGCTGGTGGTGTCGACGCTACGGACGCCAACG
GAGCCGAGCTTGTGAAAATGTCCTACACCGACAAGAACGGAAAGACTATC
GAGGGAGGTTACGCTCTGAAGGCTGGCGATAAGTACTACGCCGCTGATTA
TGACGAAGCTACAGGCGCCATTAAAGCTAAAACCACATCTTATACCGCTG
CCGATGGTACTACCAAGACTGCTGCCAATCAGCTGGGTGGAGTCGATGGA
AAAACCGAAGTGGTCACAATCGACGGAAAGACCTATCAAGCCTCCAAGGC
TGCTGGCCACGACTTCAAGGCCCAACCCGAACTGGCCGAGGCTGCTGCTA
AAACCACTGAAAACCCCCTGCAGAAAATTGACGCTGCCCTGGCCCAAGTG
GATGCCCTCCGCTCCGACCTCGGCGCTGTGCAAAACCGCTTCAACTCCGC
TATTACAAACCTCGGCAATACCGTCAATCAGCTCTCTGAAGCTAGGTCTC
GTATTGAGGATTCCGATTACGCTACCGAGGTCTCCCAGATGTCCCGTGCC
CAAATTCTCCAACAAGCCGGCACCTCCGTCCTCGCCCAAGCCAATCAGGT
GCCACAGAATGTGCTGAGCCTGCTGGCTTCTGGATCTGGATCTGGTTCTA
AAGGCGCTGCCCCTCTGCAACTCGGCAAGTGCAATATTGCGGGGTGGCTG
TTGGGCAACCCAGAATGTGACCCCCTCCTGCCCGTCCGTTCTTGGTCTGA
CATCGCTGAAACACCTAACTCCGAGAACGGCATCTGTTACCCGGGCGACT
TCATTGACTACGAGGAGCTCCGCGAACAGCTGTCTTCTGTCTCTTCTTTC
GAACGTTTCGAAATTTTCCCAAAGGAATCCTCCTGGCCAAACCATAACAC
CAACGGAGTGACCGCCGCCTGTAGCCATGAGGGCAAGTCTTCTTTCTACC
GTAATCTGCTGTGGCTGACTGAAAAAGAGGGTTCTTATCCCAAACTGAAG
AACTCTTATGTCAACAAGAAGGGCAAAGAGGTCCTGGTGCTGTGGGGTAT
CCACCACCCCCCCAACTCCAAGGAGCAGCAGAATCTGTACCAAAACGAAA
ATGCTTACGTGTCTGTCGTGACATCTAACTACAACCGGCGCTTCACGCCC
GAAATCGCCGAGCGTCCCAAAGTGCGCGATCAGGCCGGAAGGATGAACTA
CTACTGGACCCTGCTCAAACCCGGAGATACCATCATATTCGAAGCCAATG
GCAATCTCATCGCTCCCATGTATGCTTTCGCTCTCTCTCGCGGATTCGGT
TCCGGCATAATCACTAGCCACCACCACCACCACCACTAATAG
SEQ ID NO:124 ngHA1-2mut
AAAGGCGCTGCCCCTCTGCAACTCGGCAAGTGCAATATTGCGGGGTGGCT
GTTGGGCAACCCAGAATGTGACCCCCTCCTGCCCGTCCGTTCTTGGTCTG
ACATCGCTGAAACACCTAACTCCGAGAACGGCATCTGTTACCCGGGCGAC
TTCATTGACTACGAGGAGCTCCGCGAACAGCTGTCTTCTGTCTCTTCTTT
CGAACGTTTCGAAATTTTCCCAAAGGAATCCTCCTGGCCAAACCATAACA
CCAACGGAGTGACCGCCGCCTGTAGCCATGAGGGCAAGTCTTCTTTCTAC
CGTAATCTGCTGTGGCTGACTGAAAAAGAGGGTTCTTATCCCAAACTGAA
GAACTCTTATGTCAACAAGAAGGGCAAAGAGGTCCTGGTGCTGTGGGGTA
TCCACCACCCCCCCAACTCCAAGGAGCAGCAGAATCTGTACCAAAACGAA
AATGCTTACGTGTCTGTCGTGACATCTAACTACAACCGGCGCTTCACGCC
CGAAATCGCCGAGCGTCCCAAAGTGCGCGATCAGGCCGGAAGGATGAACT
ACTACTGGACCCTGCTCAAACCCGGAGATACCATCATATTCGAAGCCAAT
GGCAATCTCATCGCTCCCATGTATGCTTTCGCTCTCTCTCGCGGATTCGG
TTCCGGCATAATCACTAGCCACCACCACCACCACCACTAATAG
SEQ ID NO:125 ngSTF2.HA1-3
ATGAAATTCTTAGTCAACGTTGCCCTTGTTTTTATGGTCGTATACATTTC
TTACATCTATGCGGCCCAAGTGATCAACACCAACTCCCTGTCCCTGCTCA
CTCAAAACAACCTCCAGAAATCTCAGTCTGCTCTCGGTACTGCTATCGAG
CGTCTCTCCTCCGGCCTGAGGATCAACTCCGCTAAAGATGACGCCGCCGG
ACAAGCTATCGCTAACCGCTTTACTGCCAACATTAAAGGCCTGACCCAAG
CCTCTAGGAACGCCAATGATGGCATTTCTATCGCTCAAACCACCGAAGGC
GCCCTGAACGAAATCAATAATAACCTGCAACGTGTCCGCGAACTCGCCGT
CCAGTCCGCCCAATCTACCAACTCTCAGTCTGACCTGGACTCTATCCAAG
CTGAGATCACCCAAAGGCTCAACGAGATCGATCGTGTGTCTGGTCAAACT
CAGTTTAACGGCGTCAAAGTGCTGGCTCAAGACAACACACTCACCATCCA
AGTAGGAGCCAATGACGGCGAGACAATCGATATCGACCTGAAGCAGATCA
ATTCTCAAACTCTGGGCCTGGACTCCCTGAACGTCCAAAAGGCTTACGAC
GTGAAGGACACCGCTGTGACAACCAAAGCCTATGCTAATCAAGGAACAAC
CCTGGACGTGTCCGGACTCGATGACGCCGCTATCAAGGCCGCTACTGGCG
GCACTCAGGGAACTGCCTCTGTGACCGGAGGCGCTGTGAAGTTCGACGCC
GATAACAACAAATACTTCGTCACTATTGGTGGTTTCACTGGCGCTGACGC
CGCTAAGAACGGTGACTACGAGGTCAACGTCGCCACTGACGGAACAGTGA
CACTGGCCGCTGGCGCTACCAAGACCACAATGCCTGCTGGTGCTACTACT
AAGACAGAGGTGCAGGAACTCAAGGACACCCCTGCCGTGGTGTCCGCCGA
TGCTAAGAACGCTCTCATTGCTGGTGGTGTCGACGCTACGGACGCCAACG
GAGCCGAGCTTGTGAAAATGTCCTACACCGACAAGAACGGAAAGACTATC
GAGGGAGGTTACGCTCTGAAGGCTGGCGATAAGTACTACGCCGCTGATTA
TGACGAAGCTACAGGCGCCATTAAAGCTAAAACCACATCTTATACCGCTG
CCGATGGTACTACCAAGACTGCTGCCAATCAGCTGGGTGGAGTCGATGGA
AAAACCGAAGTGGTCACAATCGACGGAAAGACCTATCAAGCCTCCAAGGC
TGCTGGCCACGACTTCAAGGCCCAACCCGAACTGGCCGAGGCTGCTGCTA
AAACCACTGAAAACCCCCTGCAGAAAATTGACGCTGCCCTGGCCCAAGTG
GATGCCCTCCGCTCCGACCTCGGCGCTGTGCAAAACCGCTTCAACTCCGC
TATTACAAACCTCGGCAATACCGTCAATCAGCTCTCTGAAGCTAGGTCTC
GTATTGAGGATTCCGATTACGCTACCGAGGTCTCCCAGATGTCCCGTGCC
CAAATTCTCCAACAAGCCGGCACCTCCGTCCTCGCCCAAGCCAATCAGGT
GCCACAGAATGTGCTGAGCCTACTAGCATCAGGTTCCGGCTCAGGTTCCA
ATAGCGAGAACGGAATTTGCTACCCAGGAGATTTCATAGACTACGAGGAG
TTGCGCGAGCAGCTTTCGTCTGTGAGCAGCTTCGAGAGGTTCGAAATCTT
CCCGAAGGAGAGCAGCTGGCCGAATCATAACACTAACGGTGTGACAGCCG
CCTGCAGTCATGAAGGAAAGAGTTCATTCTATCGCAACCTGCTGTGGTTG
ACGGAGAAGGAGGGCAGCTACCCTAAGCTGAAGAACTCCTATGTGAACAA
AAAAGGCAAGGAGGTTCTGGTGCTGTGGGGCATACACCACCCCCCCAATA
GCAAGGAGCAGCAGAATCTGTACCAAAACGAGAATGCCTATGTGAGCGTG
GTCACTAGTAACTATAACCGTCGGTTCACTCCCGAGATCGCCGAGCGTCC
GAAGGTGAGGGACCAGGCAGGCCGGATGAACTACTACTGGACCCTATTGA
AGCCAGGGGACACGATTATCTTCGAGGCAAACGGAAACCTCATAGCGCCG
ATGTACGCCTTCGCCCTGAGCCGTGGCCACCATCATCACCACCATTAATA
G
SEQ ID NO:126 ngHA1-3
AATAGCGAGAACGGAATTTGCTACCCAGGAGATTTCATAGACTACGAGGA
GTTGCGCGAGCAGCTTTCGTCTGTGAGCAGCTTCGAAAGGTTCGAGATAT
TCCCGAAGGAGAGCAGCTGGCCGAATCATAACACTAACGGTGTGACAGCC
GCCTGCAGTCATGAAGGAAAGAGTTCATTCTATCGCAACCTGCTGTGGTT
GACGGAGAAAGAGGGCAGCTACCCTAAGTTGAAGAACTCCTATGTGAACA
AAAAAGGCAAGGAGGTTCTGGTGCTGTGGGGCATACACCACCCCCCCAAT
AGCAAGGAGCAGCAGAATCTGTACCAAAACGAGAATGCCTATGTGAGCGT
GGTCACTAGTAACTATAACCGTCGGTTCACTCCCGAGATCGCCGAGCGTC
CGAAGGTGAGGGACCAGGCAGGCCGGATGAACTACTACTGGACCCTATTG
AAGCCAGGGGACACGATTATCTTCGAGGCAAACGGAAACCTCATAGCGCC
GATGTACGCCTTCGCCCTGAGCCGTGGCCACCATCATCACCACCATTAAT
AG
SEQ ID NO:127 ngSTF2.HA1-3mut
ATGAAATTCTTAGTCAACGTTGCCCTTGTTTTTATGGTCGTATACATTTC
TTACATCTATGCGGCCCAAGTGATCAACACCAACTCCCTGTCCCTGCTCA
CTCAAAACAACCTCCAGAAATCTCAGTCTGCTCTCGGTACTGCTATCGAG
CGTCTCTCCTCCGGCCTGAGGATCAACTCCGCTAAAGATGACGCCGCCGG
ACAAGCTATCGCTAACCGCTTTACTGCCAACATTAAAGGCCTGACCCAAG
CCTCTAGGAACGCCAATGATGGCATTTCTATCGCTCAAACCACCGAAGGC
GCCCTGAACGAAATCAATAATAACCTGCAACGTGTCCGCGAACTCGCCGT
CCAGTCCGCCCAATCTACCAACTCTCAGTCTGACCTGGACTCTATCCAAG
CTGAGATCACCCAAAGGCTCAACGAGATCGATCGTGTGTCTGGTCAAACT
CAGTTTAACGGCGTCAAAGTGCTGGCTCAAGACAACACACTCACCATCCA
AGTAGGAGCCAATGACGGCGAGACAATCGATATCGACCTGAAGCAGATCA
ATTCTCAAACTCTGGGCCTGGACTCCCTGAACGTCCAAAAGGCTTACGAC
GTGAAGGACACCGCTGTGACAACCAAAGCCTATGCTAATCAAGGAACAAC
CCTGGACGTGTCCGGACTCGATGACGCCGCTATCAAGGCCGCTACTGGCG
GCACTCAGGGAACTGCCTCTGTGACCGGAGGCGCTGTGAAGTTCGACGCC
GATAACAACAAATACTTCGTCACTATTGGTGGTTTCACTGGCGCTGACGC
CGCTAAGAACGGTGACTACGAGGTCAACGTCGCCACTGACGGAACAGTGA
CACTGGCCGCTGGCGCTACCAAGACCACAATGCCTGCTGGTGCTACTACT
AAGACAGAGGTGCAGGAACTCAAGGACACCCCTGCCGTGGTGTCCGCCGA
TGCTAAGAACGCTCTCATTGCTGGTGGTGTCGACGCTACGGACGCCAACG
GAGCCGAGCTTGTGAAAATGTCCTACACCGACAAGAACGGAAAGACTATC
GAGGGAGGTTACGCTCTGAAGGCTGGCGATAAGTACTACGCCGCTGATTA
TGACGAAGCTACAGGCGCCATTAAAGCTAAAACCACATCTTATACCGCTG
CCGATGGTACTACCAAGACTGCTGCCAATCAGCTGGGTGGAGTCGATGGA
AAAACCGAAGTGGTCACAATCGACGGAAAGACCTATCAAGCCTCCAAGGC
TGCTGGCCACGACTTCAAGGCCCAACCCGAACTGGCCGAGGCTGCTGCTA
AAACCACTGAAAACCCCCTGCAGAAAATTGACGCTGCCCTGGCCCAAGTG
GATGCCCTCCGCTCCGACCTCGGCGCTGTGCAAAACCGCTTCAACTCCGC
TATTACAAACCTCGGCAATACCGTCAATCAGCTCTCTGAAGCTAGGTCTC
GTATTGAGGATTCCGATTACGCTACCGAGGTCTCCCAGATGTCCCGTGCC
CAAATTCTCCAACAAGCCGGCACCTCCGTCCTCGCCCAAGCCAATCAGGT
GCCACAGAATGTGCTGAGCCTGCTGGCTTCTGGATCTGGATCTGGTTCTA
ACTCCGAGAACGAAATCTGTTACCCGGGCGACTTCATTGACAAAGAGGAG
CTCCGCGAACAGCTGTCTTCTGTCTCTTCTTTCGAACGTTTCGAAATTTT
CCCAAAGGAATCCTCCTGGCCAAACCATAACACCAACGGAGTGACCGCCG
CCTGTAGCCATGAGGGCAAGTCTTCTTTCTACCGTAATCTGCTGTGGCTG
ACTGAAAAAGAGGGTTCTTATCCCAAACTGAAGAACTCTTATGTCAACAA
GAAGGGCAAAGAGGTCCTGGTGCTGTGGGGTATCCACCACCCCCCCAACT
CCAAGGAGCAGCAGAATCTGTACCAAAACGAAAATGCTTACGTGTCTGTC
GTGACATCTAACTACAACCGGCGCTTCACGCCCGAAATCGCCGAGCGTCC
CAAAGTGCGCGATCAGGCCGGAAGGATGAACTACTACTGGACCCTGCTCA
AACCCGGAGATACCATCATATTCGAAGCCAATGGCAATCTCATCGCTCCC
ATGTATGCTGCTGCTCTCTCTCGCGGACACCACCACCACCACCACTAATA
G
SEQ ID NO:128 ngHA1-3mut
AACTCCGAGAACGAAATCTGTTACCCGGGCGACTTCATTGACAAAGAGGA
GCTCCGCGAACAGCTGTCTTCTGTCTCTTCTTTCGAACGTTTCGAAATTT
TCCCAAAGGAATCCTCCTGGCCAAACCATAACACCAACGGAGTGACCGCC
GCCTGTAGCCATGAGGGCAAGTCTTCTTTCTACCGTAATCTGCTGTGGCT
GACTGAAAAAGAGGGTTCTTATCCCAAACTGAAGAACTCTTATGTCAACA
AGAAGGGCAAAGAGGTCCTGGTGCTGTGGGGTATCCACCACCCCCCCAAC
TCCAAGGAGCAGCAGAATCTGTACCAAAACGAAAATGCTTACGTGTCTGT
CGTGACATCTAACTACAACCGGCGCTTCACGCCCGAAATCGCCGAGCGTC
CCAAAGTGCGCGATCAGGCCGGAAGGATGAACTACTACTGGACCCTGCTC
AAACCCGGAGATACCATCATATTCGAAGCCAATGGCAATCTCATCGCTCC
CATGTATGCTGCTGCTCTCTCTCGCGGACACCACCACCACCACCACTAAT
AG
SEQ ID NO:129 wtSTF2.HA1-1ng
ATGAAATTCTTAGTCAACGTTGCCCTTGTTTTTATGGTCGTATACATTTC
TTACATCTATGCGGCCCAGGTTATCAATACCAACTCCCTGTCGTTGCTCA
CCCAAAATAACCTTAATAAAAGCCAGAGCGCACTGGGAACCGCCATAGAA
CGCCTCTCAAGCGGCCTCCGGATCAATTCTGCAAAAGACGACGCCGCCGG
TCAGGCCATCGCAAACCGCTTTACCGCCAATATCAAGGGACTGACGCAGG
CTTCGAGGAATGCTAACGATGGAATAAGCATCGCTCAAACCACGGAGGGC
GCCCTGAACGAGATCAACAACAACCTACAGCGCGTCAGGGAGCTCGCAGT
GCAGTCCGCCAATTCGACCAACTCGCAGTCGGACCTGGACTCGATCCAAG
CCGAAATCACCCAGCGCCTGAATGAGATTGACCGGGTGAGCGGTCAGACA
CAGTTTAACGGCGTGAAGGTACTTGCACAGGATAACACACTTACGATACA
GGTGGGCGCCAACGATGGTGAAACCATAGACATTGATCTCAAACAGATTA
ACAGCCAGACGCTCGGGTTGGATAGCCTGAATGTGCAAAAGGCGTACGAC
GTGAAAGACACGGCGGTCACTACCAAAGCCTACGCTAACAATGGCACTAC
CTTGGATGTGAGCGGATTGGATGATGCAGCAATCAAGGCTGCTACCGGCG
GTACGAACGGAACCGCGTCCGTGACCGGCGGTGCCGTGAAGTTCGATGCT
GACAACAATAAGTATTTCGTCACCATTGGAGGCTTTACTGGCGCCGACGC
AGCAAAGAACGGCGACTATGAAGTGAACGTGGCAACCGATGGAACCGTGA
CGCTGGCCGCTGGTGCCACCAAGACCACCATGCCAGCCGGCGCCACAACT
AAGACCGAGGTGCAGGAGTTAAAGGACACCCCCGCGGTGGTTAGCGCAGA
TGCCAAAAACGCCTTGATCGCCGGCGGAGTGGATGCAACTGATGCTAATG
GTGCGGAGCTGGTTAAAATGTCGTATACAGACAAGAATGGTAAGACGATC
GAGGGCGGTTATGCCCTTAAGGCAGGAGATAAGTATTACGCTGCTGATTA
CGATGAGGCGACGGGAGCTATTAAGGCCAAGACAACGTCATACACGGCGG
CGGACGGAACGACTAAGACGGCTGCCAATCAGTTGGGAGGGGTTGACGGG
AAGACAGAGGTCGTTACGATCGATGGCAAGACATACAACGCTTCCAAGGC
CGCTGGCCACGATTTCAAAGCTCAACCCGAACTGGCCGAGGCCGCGGCGA
AAACAACTGAGAACCCGTTGCAGAAGATTGATGCGGCCCTGGCGCAAGTA
GATGCCCTGCGCTCAGACCTGGGCGCCGTTCAAAATCGATTCAATTCCGC
GATTACAAACCTGGGCAATACAGTAAACAATCTATCCGAGGCCAGATCCC
GCATTGAAGACTCCGACTACGCGACAGAAGTAAGTAACATGAGTCGTGCC
CAGATTCTGCAGCAGGCCGGCACTAGTGTCCTGGCCCAGGCCAATCAAGT
CCCGCAGAATGTGCTGAGCCTACTAGCATCTGGATCTGGATCTGGTTCTT
CCCATAATGGCAAATTGTGTCGGCTGAAAGGCATCGCCCCTCTGCAACTC
GGCAAGTGCAATATTGCGGGGTGGCTGTTGGGCAACCCAGAATGTGACCC
CCTCCTGCCCGTCCGTTCTTGGTCTTACATCGTGGAAACACCTAACTCCG
AGAACGGCATCTGTTACCCGGGCGACTTCATTGACTACGAGGAGCTCCGC
GAACAGCTGTCTTCTGTCTCTTCTTTCGAACGTTTCGAAATTTTCCCAAA
GGAATCCTCCTGGCCAAACCATAACACCAACGGAGTGACCGCCGCCTGTA
GCCATGAGGGCAAGTCTTCTTTCTACCGTAATCTGCTGTGGCTGACTGAA
AAAGAGGGTTCTTATCCCAAACTGAAGAACTCTTATGTCAACAAGAAGGG
CAAAGAGGTCCTGGTGCTGTGGGGTATCCACCACCCCCCCAACTCCAAGG
AGCAGCAGAATCTGTACCAAAACGAAAATGCTTACGTGTCTGTCGTGACA
TCTAACTACAACCGGCGCTTCACGCCCGAAATCGCCGAGCGTCCCAAAGT
GCGCGATCAGGCCGGAAGGATGAACTACTACTGGACCCTGCTCAAACCCG
GAGATACCATCATATTCGAAGCCAATGGCAATCTCATCGCTCCCATGTAT
GCTTTCGCTCTCTCTCGCGGATTCGGTTCCGGCATAATCACTAGCCAAGC
CTCCATGCACGAGTGCAATACCAAGTGTCAAACTCCACTGGGAGCCATTC
AAAGCTCCCTGCCCTACCAAAACATCCATCCTGTGACCATTGGAGAGTGC
CCTAAATACGTGCGCCACCACCACCACCACCACTAATAG
SEQ ID NO:130 ngHA1-1
TCCCATAATGGCAAATTGTGTCGGCTGAAAGGCATCGCCCCTCTGCAACT
CGGCAAGTGCAATATTGCGGGGTGGCTGTTGGGCAACCCAGAATGTGACC
CCCTCCTGCCCGTCCGTTCTTGGTCTTACATCGTGGAAACACCTAACTCC
GAGAACGGCATCTGTTACCCGGGCGACTTCATTGACTACGAGGAGCTCCG
CGAACAGCTGTCTTCTGTCTCTTCTTTCGAACGTTTCGAAATTTTCCCAA
AGGAATCCTCCTGGCCAAACCATAACACCAACGGAGTGACCGCCGCCTGT
AGCCATGAGGGCAAGTCTTCTTTCTACCGTAATCTGCTGTGGCTGACTGA
AAAAGAGGGTTCTTATCCCAAACTGAAGAACTCTTATGTCAACAAGAAGG
GCAAAGAGGTCCTGGTGCTGTGGGGTATCCACCACCCCCCCAACTCCAAG
GAGCAGCAGAATCTGTACCAAAACGAAAATGCTTACGTGTCTGTCGTGAC
ATCTAACTACAACCGGCGCTTCACGCCCGAAATCGCCGAGCGTCCCAAAG
TGCGCGATCAGGCCGGAAGGATGAACTACTACTGGACCCTGCTCAAACCC
GGAGATACCATCATATTCGAAGCCAATGGCAATCTCATCGCTCCCATGTA
TGCTTTCGCTCTCTCTCGCGGATTCGGTTCCGGCATAATCACTAGCCAAG
CCTCCATGCACGAGTGCAATACCAAGTGTCAAACTCCACTGGGAGCCATT
CAAAGCTCCCTGCCCTACCAAAACATCCATCCTGTGACCATTGGAGAGTG
CCCTAAATACGTGCGCCACCACCACCACCACCACTAATAG
SEQ ID NO:131 ngSTF2.HA1-1wt
ATGAAATTCTTAGTCAACGTTGCCCTTGTTTTTATGGTCGTATACATTTC
TTACATCTATGCGGCCCAAGTGATCAACACCAACTCCCTGTCCCTGCTCA
CTCAAAACAACCTCCAGAAATCTCAGTCTGCTCTCGGTACTGCTATCGAG
CGTCTCTCCTCCGGCCTGAGGATCAACTCCGCTAAAGATGACGCCGCCGG
ACAAGCTATCGCTAACCGCTTTACTGCCAACATTAAAGGCCTGACCCAAG
CCTCTAGGAACGCCAATGATGGCATTTCTATCGCTCAAACCACCGAAGGC
GCCCTGAACGAAATCAATAATAACCTGCAACGTGTCCGCGAACTCGCCGT
CCAGTCCGCCCAATCTACCAACTCTCAGTCTGACCTGGACTCTATCCAAG
CTGAGATCACCCAAAGGCTCAACGAGATCGATCGTGTGTCTGGTCAAACT
CAGTTTAACGGCGTCAAAGTGCTGGCTCAAGACAACACACTCACCATCCA
AGTAGGAGCCAATGACGGCGAGACAATCGATATCGACCTGAAGCAGATCA
ATTCTCAAACTCTGGGCCTGGACTCCCTGAACGTCCAAAAGGCTTACGAC
GTGAAGGACACCGCTGTGACAACCAAAGCCTATGCTAATCAAGGAACAAC
CCTGGACGTGTCCGGACTCGATGACGCCGCTATCAAGGCCGCTACTGGCG
GCACTCAGGGAACTGCCTCTGTGACCGGAGGCGCTGTGAAGTTCGACGCC
GATAACAACAAATACTTCGTCACTATTGGTGGTTTCACTGGCGCTGACGC
CGCTAAGAACGGTGACTACGAGGTCAACGTCGCCACTGACGGAACAGTGA
CACTGGCCGCTGGCGCTACCAAGACCACAATGCCTGCTGGTGCTACTACT
AAGACAGAGGTGCAGGAACTCAAGGACACCCCTGCCGTGGTGTCCGCCGA
TGCTAAGAACGCTCTCATTGCTGGTGGTGTCGACGCTACGGACGCCAACG
GAGCCGAGCTTGTGAAAATGTCCTACACCGACAAGAACGGAAAGACTATC
GAGGGAGGTTACGCTCTGAAGGCTGGCGATAAGTACTACGCCGCTGATTA
TGACGAAGCTACAGGCGCCATTAAAGCTAAAACCACATCTTATACCGCTG
CCGATGGTACTACCAAGACTGCTGCCAATCAGCTGGGTGGAGTCGATGGA
AAAACCGAAGTGGTCACAATCGACGGAAAGACCTATCAAGCCTCCAAGGC
TGCTGGCCACGACTTCAAGGCCCAACCCGAACTGGCCGAGGCTGCTGCTA
AAACCACTGAAAACCCCCTGCAGAAAATTGACGCTGCCCTGGCCCAAGTG
GATGCCCTCCGCTCCGACCTCGGCGCTGTGCAAAACCGCTTCAACTCCGC
TATTACAAACCTCGGCAATACCGTCAATCAGCTCTCTGAAGCTAGGTCTC
GTATTGAGGATTCCGATTACGCTACCGAGGTCTCCCAGATGTCCCGTGCC
CAAATTCTCCAACAAGCCGGCACCTCCGTCCTCGCCCAAGCCAATCAGGT
GCCACAGAATGTGCTGAGCCTACTAGCATCAGGTTCCGGCTCAGGTTCCA
GCCACAACGGAAAGCTGTGCCGTCTGAAAGGCATAGCGCCACTGCAGCTC
GGCAAATGTAACATCGCAGGTTGGCTCCTTGGTAACCCGGAGTGCGACCC
CCTCCTCCCTGTACGATCCTGGAGTTATATCGTGGAGACCCCCAATAGCG
AGAACGGAATTTGCTACCCAGGAGATTTCATAGACTACGAGGAGTTGCGC
GAGCAGCTTTCGTCTGTGAGCAGCTTCGAGAGGTTCGAAATCTTCCCGAA
GGAGAGCAGCTGGCCGAATCATAACACTAACGGTGTGACAGCCGCCTGCA
GTCATGAAGGAAAGAGTTCATTCTATCGCAACCTGCTGTGGTTGACGGAG
AAAGAGGGCAGCTACCCTAAGTTGAAGAACTCCTATGTGAACAAAAAAGG
CAAGGAGGTTCTGGTGCTGTGGGGCATACACCACCCCCCCAATAGCAAGG
AGCAGCAGAATCTGTACCAAAACGAGAATGCCTATGTGAGCGTGGTCACT
AGTAACTATAACCGTCGGTTCACTCCCGAGATCGCCGAGCGTCCGAAGGT
GAGGGACCAGGCAGGCCGGATGAACTACTACTGGACCCTATTGAAGCCAG
GGGACACGATTATCTTCGAGGCAAACGGAAACCTCATAGCGCCGATGTAC
GCGTTCGCCCTGAGCCGCGGCTTTGGATCGGGGATCATCACGTCTAACGC
CTCGATGCACGAATGTAATACCAAATGCCAGACCCCACTGGGTGCTATCA
ACTCGTCCTTACCCTATCAAAATATACATCCGGTCACCATAGGCGAGTGT
CCCAAATATGTCAGACACCATCATCACCACCATTAATAG
SEQ ID NO:132 HA1-1 PR8
AGCCACAACGGAAAGCTGTGCCGTCTGAAAGGCATAGCGCCACTGCAGCT
CGGCAAATGTAACATCGCAGGTTGGCTCCTTGGTAACCCGGAGTGCGACC
CCCTCCTCCCTGTACGATCCTGGAGTTATATCGTGGAGACCCCCAATAGC
GAGAACGGAATTTGCTACCCAGGAGATTTCATAGACTACGAGGAGTTGCG
CGAGCAGCTTTCGTCTGTGAGCAGCTTCGAAAGGTTCGAGATATTCCCGA
AGGAGAGCAGCTGGCCGAATCATAACACTAACGGTGTGACAGCCGCCTGC
AGTCATGAAGGAAAGAGTTCATTCTATCGCAACCTGCTGTGGTTGACGGA
GAAAGAGGGCAGCTACCCTAAGTTGAAGAACTCCTATGTGAACAAAAAAG
GCAAGGAGGTTCTGGTGCTGTGGGGCATACACCACCCCCCCAATAGCAAG
GAGCAGCAGAATCTGTACCAAAACGAGAATGCCTATGTGAGCGTGGTCAC
TAGTAACTATAACCGTCGGTTCACTCCCGAGATCGCCGAGCGTCCGAAGG
TGAGGGACCAGGCAGGCCGGATGAACTACTACTGGACCCTATTGAAGCCA
GGGGACACGATTATCTTCGAGGCAAACGGAAACCTCATAGCGCCGATGTA
CGCCTTCGCCCTGAGCCGTGGCTTTGGATCGGGGATCATCACGTCTAACG
CCTCGATGCACGAATGTAATACCAAATGCCAGACCCCACTGGGTGCTATC
AACTCGTCCTTACCCTATCAAAATATACATCCGGTCACCATAGGCGAGTG
TCCCAAATATGTCAGACACCATCATCACCACCATTAATAG
SEQ ID NO:133 HA1-1 PR8
ATGAAATTCTTAGTCAACGTTGCCCTTGTTTTTATGGTCGTATACATTTC
TTACATCTATGCGAGCCACAACGGAAAGCTGTGCCGTCTGAAAGGCATAG
CGCCACTGCAGCTCGGCAAATGTAACATCGCAGGTTGGCTCCTTGGTAAC
CCGGAGTGCGACCCCCTCCTCCCTGTACGATCCTGGAGTTATATCGTGGA
GACCCCCAATAGCGAGAACGGAATTTGCTACCCAGGAGATTTCATAGACT
ACGAGGAGTTGCGCGAGCAGCTTTCGTCTGTGAGCAGCTTCGAAAGGTTC
GAGATATTCCCGAAGGAGAGCAGCTGGCCGAATCATAACACTAACGGTGT
GACAGCCGCCTGCAGTCATGAAGGAAAGAGTTCATTCTATCGCAACCTGC
TGTGGTTGACGGAGAAAGAGGGCAGCTACCCTAAGTTGAAGAACTCCTAT
GTGAACAAAAAAGGCAAGGAGGTTCTGGTGCTGTGGGGCATACACCACCC
CCCCAATAGCAAGGAGCAGCAGAATCTGTACCAAAACGAGAATGCCTATG
TGAGCGTGGTCACTAGTAACTATAACCGTCGGTTCACTCCCGAGATCGCC
GAGCGTCCGAAGGTGAGGGACCAGGCAGGCCGGATGAACTACTACTGGAC
CCTATTGAAGCCAGGGGACACGATTATCTTCGAGGCAAACGGAAACCTCA
TAGCGCCGATGTACGCCTTCGCCCTGAGCCGTGGCTTTGGATCGGGGATC
ATCACGTCTAACGCCTCGATGCACGAATGTAATACCAAATGCCAGACCCC
ACTGGGTGCTATCAACTCGTCCTTACCCTATCAAAATATACATCCGGTCA
CCATAGGCGAGTGTCCCAAATATGTCAGACACCATCATCACCACCATTAA
TAG
SEQ ID NO:134 FOR PRIMER
AGGCAGATCTATGAAATTCTTAGTCAACGTTGCCCTTGTTTTTATGGTCG
TATACATTTCTTACATCTATGCGAGCCACAACGGAAAGCTGTGCCGTCTG
AAAGG
SEQ ID NO:135 REV PRIMER
ACCTGCATGCCTATTAATGGTGGTGATGATGGTGTCTGACATATTTGGGA
CACTC
SEQ ID NO:136 HA0s PR8
ATGAAATTCTTAGTCAACGTTGCCCTTGTTTTTATGGTCGTATACATTTC
TTACATCTATGCGGACACCATTTGCATTGGATACCATGCAAACAACTCAA
CCGATACTGTTGATACCGTCCTTGAGAAGAACGTTACCGTCACGCACTCG
GTCAACCTATTAGAGGATAGCCACAACGGAAAGCTGTGCCGTCTGAAAGG
CATAGCGCCACTGCAGCTCGGCAAATGTAACATCGCAGGTTGGCTCCTTG
GTAACCCGGAGTGCGACCCCCTCCTCCCTGTACGATCCTGGAGTTATATC
GTGGAGACCCCCAATAGCGAGAACGGAATTTGCTACCCAGGAGATTTCAT
AGACTACGAGGAGTTGCGCGAGCAGCTTTCGTCTGTGAGCAGCTTCGAAA
GGTTCGAGATATTCCCGAAGGAGAGCAGCTGGCCGAATCATAACACTAAC
GGTGTGACAGCCGCCTGCAGTCATGAAGGAAAGAGTTCATTCTATCGCAA
CCTGCTGTGGTTGACGGAGAAAGAGGGCAGCTACCCTAAGTTGAAGAACT
CCTATGTGAACAAAAAAGGCAAGGAGGTTCTGGTGCTGTGGGGCATACAC
CACCCCCCCAATAGCAAGGAGCAGCAGAATCTGTACCAAAACGAGAATGC
CTATGTGAGCGTGGTCACTAGTAACTATAACCGTCGGTTCACTCCCGAGA
TCGCCGAGCGTCCGAAGGTGAGGGACCAGGCAGGCCGGATGAACTACTAC
TGGACCCTATTGAAGCCAGGGGACACGATTATCTTCGAGGCAAACGGAAA
CCTCATAGCGCCGATGTACGCCTTCGCCCTGAGCCGTGGCTTTGGATCGG
GGATCATCACGTCTAACGCCTCGATGCACGAATGTAATACCAAATGCCAG
ACCCCACTGGGTGCTATCAACTCGTCCTTACCCTATCAAAATATACATCC
GGTCACCATAGGCGAGTGTCCCAAATATGTCAGATCCGCCAAGTTGCGGA
TGGTGACCGGCCTCCGCAATATTCCTAGTATTCAGTCACGCGGCTTGTTC
GGCGCCATCGCTGGTTTCATCGAAGGCGGGTGGACAGGCATGATTGATGG
CTGGTATGGCTATCACCACCAGAACGAGCAGGGCTCGGGCTACGCGGCTG
ACCAGAAGTCGACTCAGAATGCCATCAATGGCATCACGAATAAGGTGAAC
ACGGTCATTGAAAAGATGAACATTCAATTTACAGCCGTAGGAAAAGAGTT
TAATAAACTGGAAAAAAGAATGGAGAATCTGAATAAGAAGGTGGACGACG
GATTTTTGGACATCTGGACGTACAACGCCGAGCTGCTGGTTCTGCTGGAA
AATGAGCGAACACTGGATTTTCATGATTCTAACGTAAAGAATCTGTACGA
GAAGGTGAAGTCCCAACTAAAGAATAATGCCAAGGAAATCGGAAATGGAT
GCTTTGAGTTTTACCACAAGTGCGATAATGAGTGCATGGAATCCGTGCGA
AATGGTACATACGATTACCCAAAGTACTCCGAAGAATCCAAGCTAAATCG
CGAAAAGGTTGATGGTGTTAAACTTGAATCCATGGGTATTTACCAACACC
ATCATCACCACCATTAATAG
SEQ ID NO:137 HA1-1 PR8 (no his tag)
ATGAAATTCTTAGTCAACGTTGCCCTTGTTTTTATGGTCGTATACATTTC
TTACATCTATGCGAGCCACAACGGAAAGCTGTGCCGTCTGAAAGGCATAG
CGCCACTGCAGCTCGGCAAATGTAACATCGCAGGTTGGCTCCTTGGTAAC
CCGGAGTGCGACCCCCTCCTCCCTGTACGATCCTGGAGTTATATCGTGGA
GACCCCCAATAGCGAGAACGGAATTTGCTACCCAGGAGATTTCATAGACT
ACGAGGAGTTGCGCGAGCAGCTTTCGTCTGTGAGCAGCTTCGAAAGGTTC
GAGATATTCCCGAAGGAGAGCAGCTGGCCGAATCATAACACTAACGGTGT
GACAGCCGCCTGCAGTCATGAAGGAAAGAGTTCATTCTATCGCAACCTGC
TGTGGTTGACGGAGAAAGAGGGCAGCTACCCTAAGTTGAAGAACTCCTAT
GTGAACAAAAAAGGCAAGGAGGTTCTGGTGCTGTGGGGCATACACCACCC
CCCCAATAGCAAGGAGCAGCAGAATCTGTACCAAAACGAGAATGCCTATG
TGAGCGTGGTCACTAGTAACTATAACCGTCGGTTCACTCCCGAGATCGCC
GAGCGTCCGAAGGTGAGGGACCAGGCAGGCCGGATGAACTACTACTGGAC
CCTATTGAAGCCAGGGGACACGATTATCTTCGAGGCAAACGGAAACCTCA
TAGCGCCGATGTACGCCTTCGCCCTGAGCCGTGGCTTTGGATCGGGGATC
ATCACGTCTAACGCCTCGATGCACGAATGTAATACCAAATGCCAGACCCC
ACTGGGTGCTATCAACTCGTCCTTACCCTATCAAAATATACATCCGGTCA
CCATAGGCGAGTGTCCCAAATATGTCAGATAATAG
SEQ ID NO:138 REV PRIMER
ACCTGCATGCCTATTATCTGACATATTTGGGACACTCGCCTATGG
SEQ ID NO:139 HA1-1 NC
ATGAAATTCTTAGTCAACGTTGCCCTTGTTTTTATGGTCGTATACATTTC
TTACATCTATGCGAGCCACAATGGTAAGCTGTGTCTGTTGAAGGGAATTG
CACCCCTCCAACTGGGCAACTGTTCGGTCGCTGGTTGGATCCTCGGAAAC
CCAGAATGCGAGCTCCTTATCAGTAAGGAATCTTGGTCTTATATTGTCGA
AACCCCGAACCCCGAGAACGGAACATGCTACCCGGGTTACTTTGCTGATT
ACGAAGAGCTTCGCGAGCAACTCAGCTCCGTATCCTCCTTCGAGCGCTTC
GAGATTTTTCCCAAAGAGTCCAGCTGGCCAAATCATACCGTCACCGGCGT
GTCGGCCTCCTGTTCCCACAACGGAAAGTCTAGCTTCTATAGAAATCTTC
TCTGGCTGACGGGTAAGAATGGTCTTTACCCCAATTTGAGCAAGTCCTAC
GTCAACAACAAAGAAAAGGAAGTTCTGGTATTGTGGGGTGTGCACCACCC
TCCGAACATCGGCAATCAGCGCGCCCTGTATCACACAGAGAACGCGTATG
TTTCCGTTGTCTCCTCACATTACTCGAGGCGCTTCACTCCTGAAATAGCT
AAGCGTCCGAAAGTGCGTGACCAGGAGGGACGTATCAACTATTATTGGAC
GCTGTTGGAGCCAGGCGATACAATTATCTTCGAGGCTAACGGTAACCTTA
TCGCTCCCTGGTACGCCTTCGCCCTGTCGCGTGGTTTCGGTAGTGGAATA
ATCACTAGTAATGCTCCTATGGACGAGTGTGACGCTAAGTGCCAAACACC
TCAGGGCGCTATCAATAGCTCCCTTCCATTCCAGAACGTCCATCCGGTTA
CCATTGGAGAGTGTCCAAAGTACGTGAGACACCATCATCACCATCACTAA
TAG
SEQ ID NO:140 FOR PRIMER
AGGCAGATCTATGAAATTCTTAGTCAACGTTGCCCTTGTTTTTATGGTCG
TATACATTTCTTACATCTATGCGAGCCACAATGGTAAGCTGTGTCTGTTG
AAG
SEQ ID NO:141 REV PRIMER
AGTCGCATGCCTATTAATGGTGGTGATGATGGTGTCTCACGTACTTTGGA
CACTCTCCAATGG
SEQ ID NO:142 HA0s NC
AGATCTATGAAGTTTCTCGTGAACGTTGCACTGGTGTTTATGGTAGTCTA
TATATCGTACATTTATGCTGACACGATTTGCATCGGTTACCATGCGAACA
ACTCCACGGATACCGTGGACACAGTGTTGGAAAAGAACGTGACCGTCACG
CACTCCGTAAACCTTCTGGAGGACAGCCACAATGGTAAGCTGTGTCTGTT
GAAGGGAATTGCACCCCTCCAACTGGGCAACTGTTCGGTCGCTGGTTGGA
TCCTCGGAAACCCAGAATGCGAGCTCCTTATCAGTAAGGAATCTTGGTCT
TATATTGTCGAAACCCCGAACCCCGAGAACGGAACATGCTACCCGGGTTA
CTTTGCTGATTACGAAGAGCTTCGCGAGCAACTCAGCTCCGTATCCTCCT
TCGAGCGCTTCGAGATTTTTCCCAAAGAGTCCAGCTGGCCAAATCATACC
GTCACCGGCGTGTCGGCCTCCTGTTCCCACAACGGAAAGTCTAGCTTCTA
TAGAAATCTTCTCTGGCTGACGGGTAAGAATGGTCTTTACCCCAATTTGA
GCAAGTCCTACGTCAACAACAAAGAAAAGGAAGTTCTGGTATTGTGGGGT
GTGCACCACCCTCCGAACATCGGCAATCAGCGCGCCCTGTATCACACAGA
GAACGCGTATGTTTCCGTTGTCTCCTCACATTACTCGAGGCGCTTCACTC
CTGAAATAGCTAAGCGTCCGAAAGTGCGTGACCAGGAGGGACGTATCAAC
TATTATTGGACGCTGTTGGAGCCAGGCGATACAATTATCTTCGAGGCTAA
CGGTAACCTTATCGCTCCCTGGTACGCCTTCGCCCTGTCGCGTGGTTTCG
GTAGTGGAATAATCACTAGTAATGCTCCTATGGACGAGTGTGACGCTAAG
TGCCAAACACCTCAGGGCGCTATCAATAGCTCCCTTCCATTCCAGAACGT
CCATCCGGTTACCATTGGAGAGTGTCCAAAGTACGTGAGATCGGCCAAAC
TTCGCATGGTCACGGGTCTGCGCAACATCCCGTCAATCCAATCTAGGGGC
CTCTTCGGCGCTATCGCCGGTTTCATTGAGGGCGGTTGGACTGGAATGGT
TGACGGATGGTACGGCTATCATCACCAGAACGAACAAGGTTCCGGTTACG
CTGCTGACCAGAAATCTACTCAGAACGCGATCAATGGTATCACGAACAAG
GTGAACAGCGTCATTGAAAAGATGAATACTCAGTTTACAGCCGTGGGCAA
AGAGTTCAATAAACTCGAGAGACGTATGGAAAACCTCAATAAGAAGGTGG
ATGACGGCTTCCTGGACATTTGGACTTACAACGCCGAGCTGCTGGTCCTG
CTCGAGAACGAGAGAACCCTTGACTTCCACGACAGCAACGTCAAGAACCT
GTACGAGAAGGTGAAAAGTCAACTTAAAAACAATGCCAAGGAGATTGGTA
ACGGCTGCTTCGAATTCTACCACAAGTGTAATAATGAGTGCATGGAATCC
GTTAAGAACGGCACCTACGATTACCCTAAATACTCAGAGGAGTCCAAGCT
TAACCGCGAGAAGATCGACGGCGTAAAACTGGAAAGCATGGGCGTATACC
AACACCATCATCACCATCACTAATAGGCATGC
SEQ ID NO:143 HA1-1 VN
ATGAAATTCTTAGTCAACGTTGCCCTTGTTTTTATGGTCGTATACATTTC
TTACATCTATGCGGAGAAGAAACACAACGGTAAGCTTTGCGACTTGGATG
GAGTCAAGCCCCTCATACTTAGAGATTGTAGTGTAGCCGGTTGGCTGCTC
GGTAACCCAATGTGCGATGAGTTCATCAATGTTCCCGAATGGTCATATAT
CGTCGAAAAAGCTAATCCTGTCAACGACCTGTGCTACCCCGGTGATTTCA
ATGACTATGAAGAACTGAAGCACCTGCTCTCCCGCATCAACCATTTCGAG
AAAATCCAGATCATTCCCAAGAGTTCCTGGTCTAGCCATGAGGCTAGTCT
GGGTGTCTCATCCGCCTGCCCATATCAGGGTAAAAGTTCTTTCTTTAGGA
ACGTAGTATGGTTGATAAAGAAAAACTCTACATACCCGACCATCAAGCGC
TCTTACAACAATACGAACCAAGAGGATCTGCTTGTCCTTTGGGGAATCCA
TCATCCTAATGATGCTGCCGAACAGACTAAGCTCTACCAAAACCCTACCA
CTTATATTTCCGTCGGCACCTCTACTCTGAACCAGCGCCTTGTGCCCAGG
ATCGCTACGAGATCAAAAGTCAACGGCCAATCGGGCCGCATGGAATTCTT
CTGGACGATCCTGAAGCCTAATGACGCTATCAACTTCGAGTCAAATGGAA
ACTTTATCGCTCCCGAGTACGCTTACAAGATCGTCAAGAAGGGCGACTCC
ACGATTATGAAGTCAGAGTTGGAGTACGGCAACTGCAACACAAAGTGCCA
AACTCCTATGGGCGCTATAAATTCTTCAATGCCGTTCCACAACATCCATC
CGCTCACGATCGGTGAGTGCCCGAAATATGTAAAGCACCATCACCACCAT
CACTAATAG
SEQ ID NO:144 FOR PRIMER
AGGCAGATCTATGAAATTCTTAGTCAACGTTGCCCTTGTTTTTATGGTCG
TATACATTTCTTACATCTATGCGGAGAAGAAACACAACGGTAAGCTTTG
SEQ ID NO:145 REV PRIMER
AGTCGCATGCCTATTATGGTGGTGATGATGGTGCTTTACATATTTCGGGC
ACTCACCG
SEQ ID NO:146 HA0s VN
AGATCTATGAAATTCTTGGTTAATGTAGCCCTGGTGTTTATGGTAGTGTA
CATTTCATACATTTATGCTGATCAAATCTGCATTGGCTACCATGCCAACA
ACAGCACCGAGCAAGTTGACACGATCATGGAGAAGAACGTAACCGTCACT
CACGCTCAAGACATCCTGGAGAAGAAACACAACGGTAAGCTTTGCGACTT
GGATGGAGTCAAGCCCCTCATACTTAGAGATTGTAGTGTAGCCGGTTGGC
TGCTCGGTAACCCAATGTGCGATGAGTTCATCAATGTTCCCGAATGGTCA
TATATCGTCGAAAAAGCTAATCCTGTCAACGACCTGTGCTACCCCGGTGA
TTTCAATGACTATGAAGAACTGAAGCACCTGCTCTCCCGCATCAACCATT
TCGAGAAAATCCAGATCATTCCCAAGAGTTCCTGGTCTAGCCATGAGGCT
AGTCTGGGTGTCTCATCCGCCTGCCCATATCAGGGTAAAAGTTCTTTCTT
TAGGAACGTAGTATGGTTGATAAAGAAAAACTCTACATACCCGACCATCA
AGCGCTCTTACAACAATACGAACCAAGAGGATCTGCTTGTCCTTTGGGGA
ATCCATCATCCTAATGATGCTGCCGAACAGACTAAGCTCTACCAAAACCC
TACCACTTATATTTCCGTCGGCACCTCTACTCTGAACCAGCGCCTTGTGC
CCAGGATCGCTACGAGATCAAAAGTCAACGGCCAATCGGGCCGCATGGAA
TTCTTCTGGACGATCCTGAAGCCTAATGACGCTATCAACTTCGAGTCAAA
TGGAAACTTTATCGCTCCCGAGTACGCTTACAAGATCGTCAAGAAGGGCG
ACTCCACGATTATGAAGTCAGAGTTGGAGTACGGCAACTGCAACACAAAG
TGCCAAACTCCTATGGGCGCTATAAATTCTTCAATGCCGTTCCACAACAT
CCATCCGCTCACGATCGGTGAGTGCCCGAAATATGTAAAGTCGAATCGTC
TCGTACTGGCGACAGGCCTGAGAAATAGTCCGCAACGTGAACGTCGTCGC
AAGAAGAGAGGACTGTTTGGTGCCATTGCAGGCTTTATTGAGGGCGGCTG
GCAGGGCATGGTTGACGGATGGTACGGCTACCACCATTCAAACGAGCAGG
GATCTGGCTACGCCGCTGACAAAGAAAGCACCCAAAAGGCCATTGATGGA
GTGACGAATAAGGTGAATTCGATCATCGACAAAATGAACACGCAATTCGA
AGCAGTGGGTCGCGAATTCAATAACCTGGAGCGCCGTATCGAGAATCTGA
ACAAGAAGATGGAAGACGGCTTTTTGGATGTCTGGACATATAACGCTGAA
TTGCTGGTCCTCATGGAAAACGAGCGTACCCTTGATTTCCACGACAGCAA
CGTTAAGAACCTCTACGACAAGGTCAGGCTCCAGCTCAGGGATAACGCCA
AGGAATTGGGAAACGGATGCTTCGAGTTCTACCACAAATGCGACAACGAG
TGCATGGAGTCAGTCAGGAATGGTACCTACGACTACCCGCAATATTCTGA
GGAGGCTCGCTTGAAGCGTGAGGAAATATCGGGTGTTAAATTGGAGAGTA
TTGGAATCTACCAGCACCATCACCACCATCACTAATAGGCATGC
SEQ ID NO:147 HA1-1 IND
ATGAAATTCTTAGTCAACGTTGCCCTTGTTTTTATGGTCGTATACATTTC
TTACATCTATGCGGAGAAAACCCATAACGGTAAGTTGTGCGACCTTGACG
GTGTAAAGCCCCTGATCCTCCGTGACTGCAGTGTTGCTGGTTGGCTTTTG
GGCAACCCCATGTGTGACGAATTTATCAACGTGCCTGAATGGTCATACAT
TGTAGAGAAGGCCAACCCCACGAACGATCTCTGTTATCCCGGCAGCTTCA
ATGACTATGAGGAACTTAAGCACCTTCTGTCACGTATCAACCACTTCGAA
AAGATCCAGATCATCCCGAAGAGCTCCTGGAGCGACCACGAAGCCAGTTC
GGGTGTGTCTTCCGCTTGCCCCTACCTCGGTAGCCCTTCCTTCTTCCGTA
ACGTAGTGTGGCTGATCAAGAAGAATAGCACTTACCCTACAATCAAAAAG
TCGTATAACAATACTAACCAAGAGGATCTGCTTGTACTCTGGGGAATTCA
TCATCCCAACGACGCGGCGGAGCAGACCAGGTTGTACCAGAACCCCACCA
CTTACATCTCCATCGGTACGTCCACACTGAATCAGCGTCTGGTCCCCAAG
ATCGCAACCAGGTCCAAGGTTAACGGTCAGTCCCGTCGTATGGAGTTCTT
CTGGACCATCCTGAAGCCCAACGACGCCATCAACTTCGAGTCCAACGGTA
ATTTCATTGCTCCGGAGTACGCCTACAAGATAGTTAAGAAGGGTGATTCA
GCGATCATGAAGTCGGAACTTGAGTATGGCAACTGCAACACTAAATGCCA
AACTCCAATGGGCGCTATCAACTCCAGTATGCCATTCCATAACATCCACC
CATTGACAATCGGTGAATGTCCCAAGTACGTGAAGCACCACCATCACCAT
CACTAATAG
SEQ ID NO:148 FOR PRIMER
AGGCAGATCTATGAAATTCTTAGTCAACGTTGCCCTTGTTTTTATGGTCG
TATACATTTCTTACATCTATGCGGAGAAAACCCATAACGGTAAGTTGTG
SEQ ID NO:149 REV PRIMER
AGTCGCATGCCTATTAATGGTGGTGATGATGGTGCTTCACGTACTTGGGA
CATTCACCGATTG
SEQ ID NO:150 HA0s IND
AGATCTATGAAGTTCCTGGTCAATGTAGCCTTGGTATTTATGGTAGTCTA
TATCTCGTACATTTACGCAGACCAGATTTGTATTGGATATCACGCTAACA
ACAGCACAGAGCAGGTAGATACTATTATGGAGAAAAATGTTACCGTCACT
CACGCCCAGGACATCCTGGAGAAAACCCATAACGGTAAGTTGTGCGACCT
TGACGGTGTAAAGCCCCTGATCCTCCGTGACTGCAGTGTTGCTGGTTGGC
TTTTGGGCAACCCCATGTGTGACGAATTTATCAACGTGCCTGAATGGTCA
TACATTGTAGAGAAGGCCAACCCCACGAACGATCTCTGTTATCCCGGCAG
CTTCAATGACTATGAGGAACTTAAGCACCTTCTGTCACGTATCAACCACT
TCGAAAAGATCCAGATCATCCCGAAGAGCTCCTGGAGCGACCACGAAGCC
AGTTCGGGTGTGTCTTCCGCTTGCCCCTACCTCGGTAGCCCTTCCTTCTT
CCGTAACGTAGTGTGGCTGATCAAGAAGAATAGCACTTACCCTACAATCA
AAAAGTCGTATAACAATACTAACCAAGAGGATCTGCTTGTACTCTGGGGA
ATTCATCATCCCAACGACGCGGCGGAGCAGACCAGGTTGTACCAGAACCC
CACCACTTACATCTCCATCGGTACGTCCACACTGAATCAGCGTCTGGTCC
CCAAGATCGCAACCAGGTCCAAGGTTAACGGTCAGTCCGGTCGTATGGAG
TTCTTCTGGACCATCCTGAAGCCCAACGACGCCATCAACTTCGAGTCCAA
CGGTAATTTCATTGCTCCGGAGTACGCCTACAAGATAGTTAAGAAGGGTG
ATTCAGCGATCATGAAGTCGGAACTTGAGTATGGCAACTGCAACACTAAA
TGCCAAACTCCAATGGGCGCTATCAACTCCAGTATGCCATTCCATAACAT
CCACCCATTGACAATCGGTGAATGTCCCAAGTACGTGAAGAGCAACAGGT
TGGTATTGGCCACCGGTTTGAGAAACAGCCCCCAGAGAGAGTCGCGTCGT
AAAAAGCGCGGCTTGTTCGGAGCCATCGCTGGCTTCATAGAGGGTGGTTG
GCAGGGAATGGTCGATGGTTGGTATGGTTATCATCATTCCAACGAGCAGG
GAAGTGGTTACGCCGCCGACAAAGAATCGACCCAGAAGGCTATTGACGGC
GTCACAAACAAAGTAAACTCTATCATTGATAAGATGAACACCCAGTTCGA
GGCTGTAGGTAGAGAATTCAACAACCTCGAAAGACGTATTGAGAACCTGA
ACAAGAAAATGGAGGATGGCTTCCTGGACGTGTGGACCTACAATGCTGAG
CTGTTGGTCCTTATGGAGAACGAGCGTACCCTCGATTTCCATGACTCAAA
CGTGAAGAACCTGTATGACAAGGTGCGTTTGCAACTGAGGGACAACGCAA
AGGAGCTTGGAAACGGTTGTTTCGAATTTTATCATAAGTGCGACAATGAG
TGTATGGAGTCGATTAGAAATGGCACGTACAACTACCCTCAATACAGCGA
AGAAGCTCGTCTCAAACGTGAGGAAATCAGCGGCGTCAAGCTCGAATCAA
TCGGTACCTATCAGCACCACCATCACCATCACTAATAGGCATGC
SEQ ID NO:151 STF2.HA1-1His (PR8)
MKFLVNVALVFMVVYISYIYAAQVINTNSLSLLTQNNLNKSQSALGTAIE
RLSSGLRTNSAKDDAAGQAIANRFTANIKGLTQASRNANDGISIAQTTEG
ALNEINNNLQRVRELAVQSANSTNSQSDLDSIQAEITQRLNEIDRVSGQT
QFNGVKVLAQDNTLTIQVGANDGETIDIDLKQINSQTLGLDSLNVQKAYD
VKDTAVTTKAYANNGTTLDVSGLDDAAIKAATGGTNGTASVTGGAVKFDA
DNNKYFVTIGGFTGADAAKNGDYEVNVATDGTVTLAAGATKTTMPAGATT
KTEVQELKDTPAVVSADAKNALIAGGVDATDANGAELVKMSYTDKNGKTI
EGGYALKAGDKYYAADYDEATGAIKAKTTSYTAADGTTKTAANQLGGVDG
KTEVVTIDGKTYNASKAAGHDFKAQPELAEAAAKTTENPLQKIDAALAQV
DALRSDLGAVQNRFNSAITNLGNTVNNLSEARSRIEDSDYATEVSNMSRA
QILQQAGTSVLAQANQVPQNVLSLLASGSGSGSSHNGKLCRLKGIAPLQL
GKCNIAGWLLGNPECDPLLPVRSWSYIVETPNSENGICYPGDFIDYEELR
EQLSSVSSFERFEIFPKESSWPNHNTNGVTAACSHEGKSSFYRNLLWLTE
KEGSYPKLKNSYVNKKGKEVLVLWGIHHPPNSKEQQNLYQNENAYVSVVT
SNYNRRFTPEIAERPKVRDQAGRMNYYWTLLKPGDTIIFEANGNLIAPMY
AFALSRGFGSGIITSNASMHECNTKCQTPLGAINSSLPYQNIHPVTIGEC
PKYVRHHHHHH
SEQ ID NO:152 ngSTF2.HA1-1His (PR8)
MKFLVNVALVFMVVYISYIYAAQVINTNSLSLLTQNNLQKSQSALGTAIE
RLSSGLRINSAKDDAAGQAIANRFTANIKGLTQASRNANDGISIAQTTEG
ALNEINNNLQRVRELAVQSAQSTNSQSDLDSIQAEITQRLNEIDRVSGQT
QFNGVKVLAQDNTLTIQVGANDGETIDIDLKQINSQTLGLDSLNVQKAYD
VKDTAVTTKAYANQGTTLDVSGLDDAAIKAATGGTQGTASVTGGAVKFDA
DNNKYFVTIGGFTGADAAKNGDYEVNVATDGTVTLAAGATKTTMPAGATT
KTEVQELKDTPAVVSADAKNALIAGGVDATDANGAELVKMSYTDKNGKTI
EGGYALKAGDKYYAADYDEATGAIKAKTTSYTAADGTTKTAANQLGGVDG
KTEVVTIDGKTYQASKAAGHDFKAQPELAEAAAKTTENPLQKIDAALAQV
DALRSDLGAVQNRFNSAITNLGNTVNQLSEARSRIEDSDYATEVSQMSRA
QILQQAGTSVLAQANQVPQNVLSLLASGSGSGSSHNGKLCRLKGIAPLQL
GKCNIAGWLLGNPECDPLLPVRSWSYIVETPNSENGICYPGDFIDYEELR
EQLSSVSSFERFEIFPKESSWPNHNTNGVTAACSHEGKSSFYRNLLWLTE
KEGSYPKLKNSYVNKKGKEVLVLWGIHHPPNSKEQQNLYQNENAYVSVVT
SNYNRRFTPEIAERPKVRDQAGRMNYYWTLLKPGDTIIFEANGNLIAPMY
AFALSRGFGSGIITSQASMHECNTKCQTPLGAIQSSLPYQNIHPVTIGEC
PKYVRHHHHHH
SEQ ID NO:153 STF2.HA1-2His (PR8)
MKFLVNVALVFMVVYISYIYAAQVINTNSLSLLTQNNLNKSQSALGTAIE
RLSSGLRINSAKDDAAGQAIANRFTANIKGLTQASRNANDGISIAQTTEG
ALNEINNNLQRVRELAVQSANSTNSQSDLDSIQAEITQRLNEIDRVSGQT
QFNGVKVLAQDNTLTIQVGANDGETIDIDLKQINSQTLGLDSLNVQKAYD
VKDTAVTTKAYANNGTTLDVSGLDDAATKAAIGGTNGTASVTGGAVKFDA
DNNKYFVTIGGFTGADAAKNGDYEVNVATDGTVTLAAGATKTTMPAGATT
KTEVQELKDTPAVVSADAKNALIAGGVDATDANGAELVKMSYTDKNGKTI
EGGYALKAGDKYYAADYDEATGAIKAKTTSYTAADGTTKTAANQLGGVDG
KTEVVTIDGKTYNASKAAGHDFKAQPELAEAAAKTTENPLQKIDAALAQV
DALRSDLGAVQNRFNSAITNLGNTVNNLSEARSRIEDSDYATEVSNMSRA
QILQQAGTSVLAQANQVPQNVLSLLASGSGSGSKGIAPQLGKCNIAGWLL
GNPECDPLLPVRSWSYIVETPNSENGICYPGDFIDYEELREQLSSVSSFE
RFEIFPKESSWPNHNTNGVTAACSHEGKSSPYRNLLWLTEKEGSYPKLKN
SYVNKKGKEVLVLWGIHHPPNSKEQQNLYQNENAYVSVVTSNYNRRFTPE
IAERPKVRDQAGRMNYYWTLLKPGDTIIFEANGNLIAPMYAFALSRGFGS
GIITSHHHHHH
SEQ ID NO:154 ngSTF2.HA1-2His (PR8)
MKFLVNVALVFMVVYISYIYAAQVINTNSLSLLTQNNLQKSQSALGTAIE
RLSSGLRINSAKDDAAGQAIANRFTANIKGLTQASRNANDGISIAQTTEG
ALNEINNNLQRVRELAVQSAQSTNSQSDLDSIQAEITQRLNEIDRVSGQT
QFNGVKVLAQDNTLTIQVGANDGETIDIDLKQINSQTLGLDSLNVQKAYD
VKDTAVTTKAYANQGTTLDVSGLDDAAIKAATGGTQGTASVTGGAVKFDA
DNNKYFVTIGGFTGADAAKNGDYEVNVATDGTVTLAAGATKTTMPAGATT
KTEVQELKDTPAVVSADAKNALIAGGVDATDANGAELVKMSYTDKNGKTI
EGGYALKAGDKYYAADYDEATGAIKAKTTSYTAADGTTKTAANQLGGVDG
KTEVVTIDGKTYQASKAAGHDFKAQPELAEAAAKTTENPLQKIDAALAQV
DALRSDLGAVQNRFNSAITNLGNTVNQLSEARSRIEDSDYATEVSQMSRA
QILQQAGTSVLAQANQVPQNVLSLLASGSGSGSKGIAPLQLGKCNIAGWL
LGNPECDPLLPVRSWSYIVETPNSENGICYPGDFIDYEELREQLSSVSSF
ERFEIFPKESSWPNHNTNGVTAACSHEGKSSFYRNLLWLTEKEGSYPKLK
NSYVNKKGKEVLVLWGIHHPPNSKEQQNLYQNENAYVSVVTSNYNRRFTP
EIAERPKVRDQAGRMNYYWTLLKPGDTIIFEANGNLIAPMYAFALSRGFG
SGIITSHHHHHH
SEQ ID NO:155 STF2.HA1-2mutHis (PR8)
MKFLVNVALVFMVVYISYIYAAQVINTNSLSLLTQNNLNKSQSALGTAIE
RLSSGLRINSAKDDAAGQAIANRFTANIKGLTQASRNANDGISIAQTTEG
ALNEINNNLQRVRELAVQSANSTNSQSDLDSIQAEITQRLNEIDRVSGQT
QFNGVKVLAQDNTLTIQVGANDGETIDIDLKQINSQTLGLDSLNVQKAYD
VKDTAVTTKAYANNGTTLDVSGLDDAAIKAATGGTNGTASVTGGAVKFDA
DNNKYFVTIGGFTGADAAKNGDYEVNVATDGTVTLAAGATKTTMPAGATT
KTEVQELKDTPAVVSADAKNALIAGGVDATDANGAELVKMSYTDKNGKTI
EGGYALKAGDKYYAADYDEATGAIKAKTTSYTAADGTTKTAANQLGGVDG
KTEVVTIDGKTYNASKAAGHDFKAQPELAEAAAKTTENPLQKIDAALAQV
DALRSDLGAVQNRFNSAITNLGNTVNNLSEARSRIEDSDYATEVSNMSRA
QILQQAGTSVLAQANQVPQNVLSLLASGSGSGSKGAAPLQLGKCNIAGWL
LGNPECDPLLPVRSWSDIAETPNSENGICYPGDFIDYEELREQLSSVSSF
ERFEIFPKESSWPNHNTNGVTAACSHEGKSSFYRNLLWLTEKEGSYPKLK
NSYVNKKGKEVLVLWGIHHPPNSKEQQNLYQNENAYVSVVTSNYNRRFTP
EIAERPKVRDQAGRMNYYWTLLKPGDTIIFEANGNLIAPMYAFALSRGFG
SGIITSHHHHHH
SEQ ID NO:156 ngSTF2.HA1-2mutHis (PR8)
MKFLVNVALVFMVVYISYIYAAQVINTNSLSLLTQNNLQKSQSALGTAIE
RLSSGLRINSAKDDAAGQAIANRFTANIKGLTQASRNANDGISIAQTTEG
ALNEINNNLQRVRELAVQSAQSTNSQSDLDSIQAEITQRLNEIDRVSGQT
QFNGVKVLAQDNTLTIQVGANDGETIDIDLKQINSQTLGLDSLNVQKAYD
VKDTAVTTKAYANQGTTLDVSGLDDAAIKAATGGTQGTASVTGGAVKFDA
DNNKYFVTIGGFTGADAAKNGDYEVNVATDGTVTLAAGATKTTMPAGATT
KTEVQELKDTPAVVSADAKNALIAGGVDATDANGAELVKMSYTDKNGKTI
EGGYALKAGDKYYAADYDEATGAIKAKTTSYTAADGTTKTAANQLGGVDG
KTEVVITDGKTYQASKAAGHDFKAQPELAEAAAKTTENPLQKIDAALAQV
DALRSDLGAVQNRFNSAITNLGNTVNQLSEARSRIEDSDYATEVSQMSRA
QILQQAGTSVLAQANQVPQNVLSLLASGSGSGSKGAAPQLGKCNIAGWLL
GNPECDPLLPVRSWSDIAETPNSENGICYPGDFIDYEELREQLSSVSSFE
RFEIFPKESSWPNHNTNGVTAACSHEGKSSFYRNLLWLTEKEGSYPKLKN
SYVNKKGKEVLVLWGIHHPPNSKEQQNLYQNENAYVSVVTSNYNRRFTPE
IAERPKVRDQAGRMNYYWTLLKPGDTIIFEANGNLIAPMYAFALSRGPGS
GIITSHHHHHH
SEQ ID NO:157 STF2.HA1-3His (PR8)
MKFLVNVALVFMVVYISYIYAAQVINTNSLSLLTQNNLNKSQSALGTAIE
RLSSGLRINSAKDDAAGQAIANRFTANIKGLTQASRNANDGISIAQTTEG
ALNEINNNLQRVRELAVQSANSTNSQSDLDSIQAEITQRLNEIDRVSGQT
QFNGVKVLAQDNTLTIQVGANDGETIDIDLKQINSQTLGLDSLNVQKAYD
VKDTAVTTKAYANNGTTLDVSGLDDAAIKAATGGTNGTASVTGGAVKFDA
DNNKYFVTIGGFTGADAAKNGDYEVNVATDGTVTLAAGATKTTMPAGATT
KTEVQELKDTPAVVSADAKNALIAGGVDATDANGAELVKMSYTDKNGKTI
EGGYALKAGDKYYAADYDEATGAIKAKTTSYTAADGTTKTAANQLGGVDG
KTEVVTIDGKTYNASKAAGHDFKAQPELAEAAAKTTENPLQKIDAALAQV
DALRSDLGAVQNRFNSAITNLGNTVNNLSEARSRIEDSDYATEVSNMSRA
QILQQAGTSVLAQANQVPQNVLSLLASGSGSGSNSENGCYPGDFIDYEEL
REQLSSVSSFERFEIFPKESSWPNHNTNGVTAACSHEGKSSFYRNLLWLT
EKEGSYPKLKNSYVNKKGKEVLVLWGIHHPPNSKEQQNLYQNENAYVSVV
TSNYNRRFTPEIAERPKVRDQAGRMNYYWTLLKPGDTIIFEANGNLIAPM
YAFALSRGHHHHHH
SEQ ID NO:158 STF2.HA1-3mutHis (PR8)
MKFLVNVALVFMVVYISYIYAAQVINTNSLSLLTQNNLNKSQSALGTAIE
RLSSGLRINSAKDDAAGQAIANRFTANIKGLTQASRNANDGISIAQTTEG
ALNEINNNLQRVRELAVQSANSTNSQSDLDSIQAEITQRLNEIDRVSGQT
QFNGVKVLAQDNTLTIQVGANDGETIDIDLKQINSQTLGLDSLNVQKAYD
VKDTAVTTKAYANNGTTLDVSGLDDAAIKAATGGTNGTASVTGGAVKFDA
DNNKYFVTIGGFTGADAAKNGDYEVNVATDGTVTLAAGATKTTMPAGATT
KTEVQELKDTPAVVSADAKNALIAGGVDATDANGAELVKMSYTDKNGKTI
EGGYALKAGDKYYAADYDEATGAIKAKTTSYTAADGTTKTAANQLGGVDG
KTEVVTIDGKTYNASKAAGHDFKAQPELAEAAAKTTENPLQKIDAALAQV
DALRSDLGAVQNRFNSAITNLGNTVNNLSEARSRIEDSDYATEVSNMSRA
QILQQAGTSVLAQANQVPQNVLSLLASGSGSGSNSENEICYPGDFIDKEE
LREQLSSVSSFERFEIFPKESSWPNHNTNGVTAACSHEGKSSFYRNLLWL
TEKEGSYPKLKNSYVNKKGKEVLVLWGIHHPPNSKEQQNLYQNENAYVSV
VTSNYNRRFTPEIAERPKVRDQAGRMNYYWTLLKPGDTIIFEANGNLIAP
MYAAALSRGHHHHHH
SEQ ID NO:159 STF2.HA1-2 (IND)
MAQVINTNSLSLLTQNNLNKSQSALGTAIERLSSGLRINSAKDDAAGQAI
ANRFTANIKGLTQASRNANDGISIAQTTEGALNEINNNLQRVRELAVQSA
NSTNSQSDLDSIQAEITQRLNEIDRVSGQTQPNGVKVLAQDNTLTIQVGA
NDGETIDIDLKQINSQTLGLDSLNVQKAYDVKDTAVTTKAYANNGTTLDV
SGLDDAAIKAATGGTNGTASVTGGAVKFDADNNKYFVTIGGFTGADAAKN
GDYEVNVATDGTVTLAAGATKTTMPAGATTKTEVQELKDTPAVVSADAKN
ALIAGGVDATDANGAELVKMSYTDKNGKTIEGGYALKAGDKYYAADYDEA
TGAIKAKTTSYTAADGTTKTAANQLGGVDGKTEVVTIDGKTYNASKAAGH
DFKAQPELAEAAAKTTENPLQKIDAALAQVDALRSDLGAVQNRFNSAITN
LGNTVNNLSEARSRIEDSDYATEVSNMSRAQILQQAGTSVLAQANQVPQN
VLSLLAGVKPLILRDCSVAGWLLGNPMCDEFINVPEWSYIVEKANPTNDL
CYPGSFNDYEELKHLLSRINHFEKIQIIPKSSWSDHEASSGVSSACPYLG
SPSFFRNVVWLIKKNSTYPTIKKSYNNTNQEDLLVLWGIHHPNDAAEQTR
LYQNPTTYISIGTSTLNQRLVPKIATRSKVNGQSGRMEFFWTILKPNDAI
NFESNGNFIAPEYAYKIVKKGDSAIMKSE
Drosophila
SEQ ID NO:160 STF2Δ.HA0shis
ATGGCACAAGTAATCAACACTAACAGTCTGTCGCTGCTGACCCAGAATAA
CCTGAACAAATCCCAGTCCGCACTGGGCACCGCTATCGAGCGTCTGTCTT
CTGGTCTGCGTATCAACAGCGCGAAAGACGATGCGGCAGGTCAGGCGATT
GCTAACCGTTTCACCGCGAACATCAAAGGTCTGACTCAGGCTTCCCGTAA
CGCTAACGACGGTATCTCCATTGCGCAGACCACTGAAGGCGCGCTGAACG
AAATCAACAACAACCTGCAGCGTGTGCGTGAACTGGCGGTTCAGTCTGCT
AACAGCACCAACTCCCAGTCTGACCTCGACTCCATCCAGGCTGAAATCAC
CCAGCGCCTGAACGAAATCGACCGTGTATCCGGCCAGACTCAGTTCAACG
GCGTGAAAGTCCTGGCGCAGGACAACACCCTGACCATCCAGGTTGGCGCC
AACGACGGTGAAACTATCGATATCGATCTGAAGCAGATCAACTCTCAGAC
CCTGGGTCTGGACTCACTGAACGTGCATGGAGCGCCGGTGGATCCTGCTA
GCCCATGGACCGAAAACCCGCTGCAGAAAATTGATGCCGCGCTGGCGCAG
GTGGATGCGCTGCGCTCTGATCTGGGTGCGGTACAAAACCGTTTCAACTC
TGCTATCACCAACCTGGGCAATACCGTAAACAATCTGTCTGAAGCGCGTA
GCCGTATCGAAGATTCCGACTACGCGACCGAAGTTTCCAACATGTCTCGC
GCGCAGATTTTGCAGCAGGCCGGTACTTCCGTTCTGGCGCAGGCTAACCA
GGTCCCGCAGAACGTGCTGTCTCTGTTACGTGAATTCTCTAGATATCCAG
CACAGTGGCGGCCGCTCGACACAATATGTATAGGCTACCATGCGAACAAT
TCAACCGACACTGTTGACACAGTACTCGAGAAGAATGTGACAGTGACACA
CTCTGTTAACCTGCTCGAAGACAGCCACAACGGAAAACTATGTAGATTAA
AAGGAATAGCCCCACTACAATTGGGGAAATGTAACATCGCCGGATGGCTT
TTGGGAAACCCAGAATGCGACCCACTGCTTCCAGTGAGATCATGGTCCTA
CATTGTAGAAACACCAAACTCTGAGAATGGAATATGTTATCCAGGAGATT
TCATCGACTATGAGGAGCTGAGGGAGCAATTGAGCTCAGTGTCATCATTC
GAAAGATTCGAAATATTTCCCAAAGAAAGCTCATGGCCCAACCACAACAC
AAACGGAGTAACGGCAGCATGCTCCCATGAGGGGAAAAGCAGTTTTTACA
GAAATTTGCTATGGCTGACGGAGAAGGAGGGCTCATACCCAAAGCTGAAA
AATTCTTATGTGAACAAAAAAGGGAAAGAAGTCCTTGTACTGTGGGGTAT
TCATCACCCGCCTAACAGTAAGGAACAACAGAATCTCTATCAGAATGAAA
ATGCTTATGTCTCTGTAGTGACTTCAAATTATAACAGGAGATTTACCCCG
GAAATAGCAGAAAGACCCAAAGTAAGAGATCAAGCTGGGAGGATGAACTA
TTACTGGACCTTGCTAAAACCCGGAGACACAATAATATTTGAGGCAAATG
GAAATCTAATAGCACCAATGTATGCTTTCGCACTGAGTAGAGGCTTTGGG
TCCGGCATCATCACCTCAAACGCATCAATGCATGAGTGTAACACGAAGTG
TCAAACACCCCTGGGAGCTATAAACAGCAGTCTCCCTTACCAGAATATAC
ACCCAGTCACAATAGGAGAGTGCCCAAAATACGTCAGGAGTGCCAAATTG
AGGATGGTTACAGGACTAAGGAACATTCCGTCCATTCAATCCAGAGGTCT
ATTTGGAGCCATTGCCGGTTTTATTGAAGGGGGATGGACTGGAATGATAG
ATGGATGGTATGGTTATCATCATCAGAATGAACAGGGATCAGGCTATGCA
GCGGATCAAAAAAGCACACAAAATGCCATTAACGGGATTACAAACAAGGT
GAACACTGTTATCGAGAAAATGAACATTCAATTCACAGCTGTGGGTAAAG
AATTCAACAAATTAGAAAAAAGGATGGAAAATTTAAATAAAAAAGTTGAT
GATGGATTTCTGGACATTTGGACATATAATGCAGAATTGTTAGTTCTACT
GGAAAATGAAAGGACTCTGGATTTCCATGACTCAAATGTGAAGAATCTGT
ATGAGAAAGTAAAAAGCCAATTAAAGAATAATGCCAAAGAAATCGGAAAT
GGATGTTTTGAGTTCTACCACAAGTGTGACAATGAATGCATGGAAAGTGT
AAGAAATGGGACTTATGATTATCCCAAATATTCAGAAGAGTCAAAGTTGA
ACAGGGAAAAGGTAGATGGAGTGAAATTGGAATCAATGGGGATCTATCAG
ACGCGTACCGGTCATCATCACCATCACCATTGA
SEQ ID NO:161 FOR PRIMER
ATTCTCCGGCGGCCGCTCGACACAATATGTATAGGCTACC
SEQ ID NO:162 REV PRIMER
AGTCTTGCGGCCGCCTATTAATGGTGATGGTGATGATGCTGATAGATCCC
CATTGATTCC
SEQ ID NO:163 HA0s PR8 template
GACACAATATGTATAGGCTACCATGCGAACAATTCAACCGACACTGTTGA
CACAGTACTCGAGAAGAATGTGACAGTGACACACTCTGTTAACCTGCTCG
AAGACAGCCACAACGGAAAACTATGTAGATTAAAAGGAATAGCCCCACTA
CAATTGGGGAAATGTAACATCGCCGGATGGCTTTTGGGAAACCCAGAATG
CGACCCACTGCTTCCAGTGAGATCATGGTCCTACATTGTAGAAACACCAA
ACTCTGAGAATGGAATATGTTATCCAGGAGATTTCATCGACTATGAGGAG
CTGAGGGAGCAATTGAGCTCAGTGTCATCATTCGAAAGATTCGAAATATT
TCCCAAAGAAAGCTCATGGCCCAACCACAACACAAACGGAGTAACGGCAG
CATGCTCCCATGAGGGGAAAAGCAGTTTTTACAGAAATTTGCTATGGCTG
ACGGAGAAGGAGGGCTCATACCCAAAGCTGAAAAATTCTTATGTGAACAA
AAAAGGGAAAGAAGTCCTTGTACTGTGGGGTATTCATCACCCGCCTAACA
GTAAGGAACAACAGAATCTCTATCAGAATGAAAATGCTTATGTCTCTGTA
GTGACTTCAAATTATAACAGGAGATTTACCCCGGAAATAGCAGAAAGACC
CAAAGTAAGAGATCAAGCTGGGAGGATGAACTATTACTGGACCTTGCTAA
AACCCGGAGACACAATAATATTTGAGGCAAATGGAAATCTAATAGCACCA
ATGTATGCTTTCGCACTGAGTAGAGGCTTTGGGTCCGGCATCATCACCTC
AAACGCATCAATGCATGAGTGTAACACGAAGTGTCAAACACCCCTGGGAG
CTATAAACAGCAGTCTCCCTTACCAGAATATACACCCAGTCACAATAGGA
GAGTGCCCAAAATACGTCAGGAGTGCCAAATTGAGGATGGTTACAGGACT
AAGGAACATTCCGTCCATTCAATCCAGAGGTCTATTTGGAGCCATTGCCG
GTTTTATTGAAGGGGGATGGACTGGAATGATAGATGGATGGTATGGTTAT
CATCATCAGAATGAACAGGGATCAGGCTATGCAGCGGATCAAAAAAGCAC
ACAAAATGCCATTAACGGGATTACAAACAAGGTGAACACTGTTATCGAGA
AAATGAACATTCAATTCACAGCTGTGGGTAAAGAATTCAACAAATTAGAA
AAAAGGATGGAAAATTTAAATAAAAAAGTTGATGATGGATTTCTGGACAT
TTGGACATATAATGCAGAATTGTTAGTTCTACTGGAAAATGAAAGGACTC
TGGATTTCCATGACTCAAATGTGAAGAATCTGTATGAGAAAGTAAAAAGC
CAATTAAAGAATAATGCCAAAGAAATCGGAAATGGATGTTTTGAGTTCTA
CCACAAGTGTGACAATGAATGCATGGAAAGTGTAAGAAATGGGACTTATG
ATTATCCCAAATATTCAGAAGAGTCAAAGTTGAACAGGGAAAAGGTAGAT
GGAGTGAAATTGGAATCAATGGGGATCTATCAG
SEQ ID NO:164 STF2Δ.HA0s
ATGGCACAAGTAATCAACACTAACAGTCTGTCGCTGCTGACCCAGAATAA
CCTGAACAAATCCCAGTCCGCACTGGGCACCGCTATCGAGCGTCTGTCTT
CTGGTCTGCGTATCAACAGCGCGAAAGACGATGCGGCAGGTCAGGCGATT
GCTAACCGTTTCACCGCGAACATCAAAGGTCTGACTCAGGCTTCCCGTAA
CGCTAACGACGGTATCTCCATTGCGCAGACCACTGAAGGCGCGCTGAACG
AAATCAACAACAACCTGCAGCGTGTGCGTGAACTGGCGGTTCAGTCTGCT
AACAGCACCAACTCCCAGTCTGACCTCGACTCCATCCAGGCTGAAATCAC
CCAGCGCCTGAACGAAATCGACCGTGTATCCGGCCAGACTCAGTTCAACG
GCGTGAAAGTCCTGGCGCAGGACAACACCCTGACCATCCAGGTTGGCGCC
AACGACGGTGAAACTATCGATATCGATCTGAAGCAGATCAACTCTCAGAC
CCTGGGTCTGGACTCACTGAACGTGCATGGAGCGCCGGTGGATCCTGCTA
GCCCATGGACCGAAAACCCGCTGCAGAAAATTGATGCCGCGCTGGCGCAG
GTGGATGCGCTGCGCTCTGATCTGGGTGCGGTACAAAACCGTTTCAACTC
TGCTATCACCAACCTGGGCAATACCGTAAACAATCTGTCTGAAGCGCGTA
GCCGTATCGAAGATTCCGACTACGCGACCGAAGTTTCCAACATGTCTCGC
GCGCAGATTTTGCAGCAGGCCGGTACTTCCGTTCTGGCGCAGGCTAACCA
GGTCCCGCAGAACGTGCTGTCTCTGTTACGTGAATTCTCTAGATATCCAG
CACAGTGGCGGCCGCTCGACACAATATGTATAGGCTACCATGCGAACAAT
TCAACCGACACTGTTGACACAGTACTCGAGAAGAATGTGACAGTGACACA
CTCTGTTAACCTGCTCGAAGACAGCCACAACGGAAAACTATGTAGATTAA
AAGGAATAGCCCCACTACAATTGGGGAAATGTAACATCGCCGGATGGCTT
TTGGGAAACCCAGAATGCGACCCACTGCTTCCAGTGAGATCATGGTCCTA
CATTGTAGAAACACCAAACTCTGAGAATGGAATATGTTATCCAGGAGATT
TCATCGACTATGAGGAGCTGAGGGAGCAATTGAGCTCAGTGTCATCATTC
GAAAGATTCGAAATATTTCCCAAAGAAAGCTCATGGCCCAACCACAACAC
AAACGGAGTAACGGCAGCATGCTCCCATGAGGGGAAAAGCAGTTTTTACA
GAAATTTGCTATGGCTGACGGAGAAGGAGGGCTCATACCCAAAGCTGAAA
AATTCTTATGTGAACAAAAAAGGGAAAGAAGTCCTTGTACTGTGGGGTAT
TCATCACCCGCCTAACAGTAAGGAACAACAGAATCTCTATCAGAATGAAA
ATGCTTATGTCTCTGTAGTGACTTCAAATTATAACAGGAGATTTACCCCG
GAAATAGCAGAAAGACCCAAAGTAAGAGATCAAGCTGGGAGGATGAACTA
TTACTGGACCTTGCTAAAACCCGGAGACACAATAATATTTGAGGCAAATG
GAAATCTAATAGCACCAATGTATGCTTTCGCACTGAGTAGAGGCTTTGGG
TCCGGCATCATCACCTCAAACGCATCAATGCATGAGTGTAACACGAAGTG
TCAAACACCCCTGGGAGCTATAAACAGCAGTCTCCCTTACCAGAATATAC
ACCCAGTCACAATAGGAGAGTGCCCAAAATACGTCAGGAGTGCCAAATTG
AGGATGGTTACAGGACTAAGGAACATTCCGTCCATTCAATCCAGAGGTCT
ATTTGGAGCCATTGCCGGTTTTATTGAAGGGGGATGGACTGGAATGATAG
ATGGATGGTATGGTTATCATCATCAGAATGAACAGGGATCAGGCTATGCA
GCGGATCAAAAAAGCACACAAAATGCCATTAACGGGATTACAAACAAGGT
GAACACTGTTATCGAGAAAATGAACATTCAATTCACAGCTGTGGGTAAAG
AATTCAACAAATTAGAAAAAAGGATGGAAAATTTAAATAAAAAAGTTGAT
GATGGATTTCTGGACATTTGGACATATAATGCAGAATTGTTAGTTCTACT
GGAAAATGAAAGGACTCTGGATTTCCATGACTCAAATGTGAAGAATCTGT
ATGAGAAAGTAAAAAGCCAATTAAAGAATAATGCCAAAGAAATCGGAAAT
GGATGTTTTGAGTTCTACCACAAGTGTGACAATGAATGCATGGAAAGTGT
AAGAAATGGGACTTATGATTATCCCAAATATTCAGAAGAGTCAAAGTTGA
ACAGGGAAAAGGTAGATGGAGTGAAATTGGAATCAATGGGGATCTATCAG
TAG
SEQ ID NO:165 FOR PRIMER
ATTCTCCGGCGGCCGCTCGACACAATATGTATAGGCTACC
SEQ ID NO:166 REV PRIMER
AGTCTTGCGGCCGCCTATTAATGGTGATGGTGATGATGCTGATAGATCCC
CATTGATTCC
SEQ ID NO:167 HA0s.STF2Δ
GACACAATATGTATAGGCTACCATGCGAACAATTCAACCGACACTGTTGA
CACAGTACTCGAGAAGAATGTGACAGTGACACACTCTGTTAACCTGCTCG
AAGACAGCCACAACGGAAAACTATGTAGATTAAAAGGAATAGCCCCACTA
CAATTGGGGAAATGTAACATCGCCGGATGGCTTTTGGGAAACCCAGAATG
CGACCCACTGCTTCCAGTGAGATCATGGTCCTACATTGTAGAAACACCAA
ACTCTGAGAATGGAATATGTTATCCAGGAGATTTCATCGACTATGAGGAG
CTGAGGGAGCAATTGAGCTCAGTGTCATCATTCGAAAGATTCGAAATATT
TCCCAAAGAAAGCTCATGGCCCAACCACAACACAAACGGAGTAACGGCAG
CATGCTCCCATGAGGGGAAAAGCAGTTTTTACAGAAATTTGCTATGGCTG
ACGGAGAAGGAGGGCTCATACCCAAAGCTGAAAAATTCTTATGTGAACAA
AAAAGGGAAAGAAGTCCTTGTACTGTGGGGTATTCATCACCCGCCTAACA
GTAAGGAACAACAGAATCTCTATCAGAATGAAAATGCTTATGTCTCTGTA
GTGACTTCAAATTATAACAGGAGATTTACCCCGGAAATAGCAGAAAGACC
CAAAGTAAGAGATCAAGCTGGGAGGATGAACTATTACTGGACCTTGCTAA
AACCCGGAGACACAATAATATTTGAGGCAAATGGAAATCTAATAGCACCA
ATGTATGCTTTCGCACTGAGTAGAGGCTTTGGGTCCGGCATCATCACCTC
AAACGCATCAATGCATGAGTGTAACACGAAGTGTCAAACACCCCTGGGAG
CTATAAACAGCAGTCTCCCTTACCAGAATATACACCCAGTCACAATAGGA
GAGTGCCCAAAATACGTCAGGAGTGCCAAGTTGAGGATGGTTACAGGACT
AAGGAACATTCCGTCCATTCAATCCAGAGGTCTATTTGGAGCCATTGCCG
GTTTTATTGAAGGGGGATGGACTGGAATGATAGATGGATGGTATGGTTAT
CATCATCAGAATGAACAGGGATCAGGCTATGCAGCGGATCAAAAAAGCAC
ACAAAATGCCATTAACGGGATTACAAACAAGGTGAACACTGTTATCGAGA
AAATGAACATTCAATTCACAGCTGTGGGTAAAGAATTCAACAAATTAGAA
AAAAGGATGGAAAATTTAAATAAAAAAGTTGATGATGGATTTCTGGACAT
TTGGACATATAATGCAGAATTGTTAGTTCTACTGGAAAATGAAAGGACTC
TGGATTTCCATGACTCAAATGTGAAGAATCTGTATGAGAAAGTAAAAAGC
CAATTAAAGAATAATGCCAAAGAAATCGGAAATGGATGTTTTGAGTTCTA
CCACAAGTGTGACAATGAATGCATGGAAAGTGTAAGAAATGGGACTTATG
ATTATCCCAAATATTCAGAAGAGTCAAAGTTGAACAGGGAAAAGGTAGAT
GGAGTGAAATTGGAATCAATGGGGATCTATCAGGAATTCTCTAGATATCC
AGCACAGTGGCGGCCGCTCGCACAAGTAATCAACACTAACAGTCTGTCGC
TGCTGACCCAGAATAACCTGAACAAATCCCAGTCCGCACTGGGCACCGCT
ATCGAGCGTCTGTCTTCTGGTCTGCGTATCAACAGCGCGAAAGACGATGC
GGCAGGTCAGGCGATTGCTAACCGTTTCACCGCGAACATCAAAGGTCTGA
CTCAGGCTTCCCGTAACGCTAACGACGGTATCTCCATTGCGCAGACCACT
GAAGGCGCGCTGAACGAAATCAACAACAACCTGCAGCGTGTGCGTGAACT
GGCGGTTCAGTCTGCTAACAGCACCAACTCCCAGTCTGACCTCGACTCCA
TCCAGGCTGAAATCACCCAGCGCCTGAACGAAATCGACCGTGTATCCGGC
CAGACTCAGTTCAACGGCGTGAAAGTCCTGGCGCAGGACAACACCCTGAC
CATCCAGGTTGGCGCCAACGACGGTGAAACTATCGATATCGATCTGAAGC
AGATCAACTCTCAGACCCTGGGTCTGGACTCACTGAACGTGCATGGAGCG
CCGGTGGATCCTGCTAGCCCATGGACCGAAAACCCGCTGCAGAAAATTGA
TGCCGCGCTGGCGCAGGTGGATGCGCTGCGCTCTGATCTGGGTGCGGTAC
AAAACCGTTTCAACTCTGCTATCACCAACCTGGGCAATACCGTAAACAAT
CTGTCTGAAGCGCGTAGCCGTATCGAAGATTCCGACTACGCGACCGAAGT
TTCCAACATGTCTCGCGCGCAGATTTTGCAGCAGGCCGGTACTTCCGTTC
TGGCGCAGGCTAACCAGGTCCCGCAGAACGTGCTGTCTCTGTTACGTTAA
TAG
SEQ ID NO:168 FOR PRIMER
AGGCAAGATCTGACACAATATGTATAGGCTACC
SEQ ID NO:169 REV PRIMER
AGTCAGACGCGTCTATTAACGTAACAGAGACAGCAC
SEQ ID NO:170 HA0s.his
GACACAATATGTATAGGCTACCATGCGAACAATTCAACCGACACTGTTGA
CACAGTACTCGAGAAGAATGTGACAGTGACACACTCTGTTAACCTGCTCG
AAGACAGCCACAACGGAAAACTATGTAGATTAAAAGGAATAGCCCCACTA
CAATTGGGGAAATGTAACATCGCCGGATGGCTTTTGGGAAACCCAGAATG
CGACCCACTGCTTCCAGTGAGATCATGGTCCTACATTGTAGAAACACCAA
ACTCTGAGAATGGAATATGTTATCCAGGAGATTTCATCGACTATGAGGAG
CTGAGGGAGCAATTGAGCTCAGTGTCATCATTCGAAAGATTCGAAATATT
TCCCAAAGAAAGCTCATGGCCCAACCACAACACAAACGGAGTAACGGCAG
CATGCTCCCATGAGGGGAAAAGCAGTTTTTACAGAAATTTGCTATGGCTG
ACGGAGAAGGAGGGCTCATACCCAAAGCTGAAAAATTCTTATGTGAACAA
AAAAGGGAAAGAAGTCCTTGTACTGTGGGGTATTCATCACCCGCCTAACA
GTAAGGAACAACAGAATCTCTATCAGAATGAAAATGCTTATGTCTCTGTA
GTGACTTCAAATTATAACAGGAGATTTACCCCGGAAATAGCAGAAAGACC
CAAAGTAAGAGATCAAGCTGGGAGGATGAACTATTACTGGACCTTGCTAA
AACCCGGAGACACAATAATATTTGAGGCAAATGGAAATCTAATAGCACCA
ATGTATGCTTTCGCACTGAGTAGAGGCTTTGGGTCCGGCATCATCACCTC
AAACGCATCAATGCATGAGTGTAACACGAAGTGTCAAACACCCCTGGGAG
CTATAAACAGCAGTCTCCCTTACCAGAATATACACCCAGTCACAATAGGA
GAGTGCCCAAAATACGTCAGGAGTGCCAAATTGAGGATGGTTACAGGACT
AAGGAACATTCCGTCCATTCAATCCAGAGGTCTATTTGGAGCCATTGCCG
GTTTTATTGAAGGGGGATGGACTGGAATGATAGATGGATGGTATGGTTAT
CATCATCAGAATGAACAGGGATCAGGCTATGCAGCGGATCAAAAAAGCAC
ACAAAATGCCATTAACGGGATTACAAACAAGGTGAACACTGTTATCGAGA
AAATGAACATTCAATTCACAGCTGTGGGTAAAGAATTCAACAAATTAGAA
AAAAGGATGGAAAATTTAAATAAAAAAGTTGATGATGGATTTCTGGACAT
TTGGACATATAATGCAGAATTGTTAGTTCTACTGGAAAATGAAAGGACTC
TGGATTTCCATGACTCAAATGTGAAGAATCTGTATGAGAAAGTAAAAAGC
CAATTAAAGAATAATGCCAAAGAAATCGGAAATGGATGTTTTGAGTTCTA
CCACAAGTGTGACAATGAATGCATGGAAAGTGTAAGAAATGGGACTTATG
ATTATCCCAAATATTCAGAAGAGTCAAAGTTGAACAGGGAAAAGGTAGAT
GGAGTGAAATTGGAATCAATGGGGATCTATCAGACGCGTACCGGTCATCA
TCACCATCACCATTGA
SEQ ID NO:171 FOR PRIMER
ATTCTCCGGCGGCCGCTCGACACAATATGTATAGGCTACC
SEQ ID NO:172 REV PRIMER
AGTCTTGCGGCCGCCTATTAATGGTGATGGTGATGATGCTGATAGATCCC
CATTGATTCC
SEQ ID NO:173 HA0s
GACACAATATGTATAGGCTACCATGCGAACAATTCAACCGACACTGTTGA
CACAGTACTCGAGAAGAATGTGACAGTGACACACTCTGTTAACCTGCTCG
AAGACAGCCACAACGGAAAACTATGTAGATTAAAAGGAATAGCCCCACTA
CAATTGGGGAAATGTAACATCGCCGGATGGCTTTTGGGAAACCCAGAATG
CGACCCACTGCTTCCAGTGAGATCATGGTCCTACATTGTAGAAACACCAA
ACTCTGAGAATGGAATATGTTATCCAGGAGATTTCATCGACTATGAGGAG
CTGAGGGAGCAATTGAGCTCAGTGTCATCATTCGAAAGATTCGAAATATT
TCCCAAAGAAAGCTCATGGCCCAACCACAACACAAACGGAGTAACGGCAG
CATGCTCCCATGAGGGGAAAAGCAGTTTTTACAGAAATTTGCTATGGCTG
ACGGAGAAGGAGGGCTCATACCCAAAGCTGAAAAATTCTTATGTGAACAA
AAAAGGGAAAGAAGTCCTTGTACTGTGGGGTATTCATCACCCGCCTAACA
GTAAGGAACAACAGAATCTCTATCAGAATGAAAATGCTTATGTCTCTGTA
GTGACTTCAAATTATAACAGGAGATTTACCCCGGAAATAGCAGAAAGACC
CAAAGTAAGAGATCAAGCTGGGAGGATGAACTATTACTGGACCTTGCTAA
AACCCGGAGACACAATAATATTTGAGGCAAATGGAAATCTAATAGCACCA
ATGTATGCTTTCGCACTGAGTAGAGGCTTTGGGTCCGGCATCATCACCTC
AAACGCATCAATGCATGAGTGTAACACGAAGTGTCAAACACCCCTGGGAG
CTATAAACAGCAGTCTCCCTTACCAGAATATACACCCAGTCACAATAGGA
GAGTGCCCAAAATACGTCAGGAGTGCCAAATTGAGGATGGTTACAGGACT
AAGGAACATTCCGTCCATTCAATCCAGAGGTCTATTTGGAGCCATTGCCG
GTTTTATTGAAGGGGGATGGACTGGAATGATAGATGGATGGTATGGTTAT
CATCATCAGAATGAACAGGGATCAGGCTATGCAGCGGATCAAAAAAGCAC
ACAAAATGCCATTAACGGGATTACAAACAAGGTGAACACTGTTATCGAGA
AAATGAACATTCAATTCACAGCTGTGGGTAAAGAATTCAACAAATTAGAA
AAAAGGATGGAAAATTTAAATAAAAAAGTTGATGATGGATTTCTGGACAT
TTGGACATATAATGCAGAATTGTTAGTTCTACTGGAAAATGAAAGGACTC
TGGATTTCCATGACTCAAATGTGAAGAATCTGTATGAGAAAGTAAAAAGC
CAATTAAAGAATAATGCCAAAGAAATCGGAAATGGATGTTTTGAGTTCTA
CCACAAGTGTGACAATGAATGCATGGAAAGTGTAAGAAATGGGACTTATG
ATTATCCCAAATATTCAGAAGAGTCAAAGTTGAACAGGGAAAAGGTAGAT
GGAGTGAAATTGGAATCAATGGGGATCTATCAG
SEQ ID NO:174 FOR PRIMER
AGGCAAGATCTGACACAATATGTATAGGCTACC
SEQ ID NO:175 REV PRIMER
AGTCAGACGCGTCTATTAACGTAACAGAGACAGCAC
SEQ ID NO:176 HA0sHis (PR8)
DTICIGYHANNSTDTVDTVLEKNVTVTHSVNLLEDSHNGKLCRLKGIAPL
QLGKCNIAGWLLGNPECDPLLPVRSWSYIVETPNSENGICYPGDFIDYEE
LREQLSSVSSFERFEIFPKESSWPNHNTNGVTAACSHEGKSSFYRNLLWL
TEKEGSYPKLKNSVTNKKGKEVLVLWGIHHPPNSKEQQNLYQNENAYVSV
VTSNYNRRFTPEIAERPKVRDQAGRMNYYWTLLKPGDTIIFEANGNLIAP
MYAFALSRGFGSGIITSNASMHECNTKCQTPLGAINSSLPYQNIHPVTIG
ECPKYVRSAKLRMVTGLRNIPSIQSRGLFGAIAGFIEGGWTGMIDGWYGY
HHQNEQGSGYAADQKSTQNAINGITNKVNTVIEKMNIQFTAVGKEFNKLE
KRMENLNKKVDDGFLDIWTYNAELLVLLENERTLDFHDSNVKNLYEKVKS
QLKNNAKEIGNGCFEFYHKCDNECMESVRNGTYDYPKYSEESKLNREKVD
GVKLESMGIYQHHHHHH
SEQ ID NO:177 STF2Δ.HA0s (PR8)
MAQVINTNSLSLLTQNNLNKSQSALGTAIERLSSGLRINSAKDDAAGQAI
ANRFTANIKGLTQASRNANDGISIAQTTEGALNEINNNLQRVRELAVQSA
NSTNSQSDLDSIQAEITQRLNEIDRVSGQTQFNGVKVLAQDNTLTIQVGA
NDGETIDIDLKQINSQTLGLDSLNVHGAPVDPASPWTENPLQKIDAALAQ
VDALRSDLGAVQNRFNSAITNLGNTVNNLSEARSRIEDSDYATEVSNMSR
AQILQQAGTSVLAQANQVPQNVLSLLREFSRYPAQWRPLDTICIGYHANN
STDTVDTVLEKNVTVTHSVNLLEDSHNGKLCRLKGIAPLQLGKCNIAGWL
LGNPECDPLLPVRSWSYIVETPNSENGICYPGDFIDYEELREQLSSVSSF
ERFEIFPKESSWPNHNTNGVTAACSHEGKSSFYRNLLWLTEKEGSYPKLK
NSYVNKKGKEVLVLWGIHHPPNSKEQQNLYQNENAYVSVVTSNYNRRFTP
EIAERPKVRDQAGRMNYYWTLLKPGDTIIFEANGNLIAPMYAFALSRGFG
SGIITSNASMHECNTKCQTPLGAINSSLPYQNIHPVTIGECPKYVRSAKL
RMVTGLRNIPSIQSRGLFGAIAGFIEGGWTGMIDGWYGYHHQNEQGSGYA
ADQKSTQNAINGITNKVNTVIEKMNIQFTAVGKEFNKLEKRMENLNKKVD
DGFLDIWTYNAELLVLLENERTLDFHDSNVKNLYEKVKSQLKNNAKEIGN
GCFEFYHKCDNECMESVRNGTYDYPKYSEESKLNREKVDGVKLESMGIYQ
SEQ ID NO:178 STF2
ATGGCACAAGTAATCAACACTAACAGTCTGTCGCTGCTGACCCAGAATAA
CCTGAACAAATCCCAGTCCGCACTGGGCACCGCTATCGAGCGTCTGTCTT
CTGGTCTGCGTATCAACAGCGCGAAAGACGATGCGGCAGGTCAGGCGATT
GCTAACCGTTTCACCGCGAACATCAAAGGTCTGACTCAGGCTTCCCGTAA
CGCTAACGACGGTATCTCCATTGCGCAGACCACTGAAGGCGCGCTGAACG
AAATCAACAACAACCTGCAGCGTGTGCGTGAACTGGCGGTTCAGTCTGCT
AACAGCACCAACTCCCAGTCTGACCTCGACTCCATCCAGGCTGAAATCAC
CCAGCGCCTGAACGAAATCGACCGTGTATCCGGCCAGACTCAGTTCAACG
GCGTGAAAGTCCTGGCGCAGGACAACACCCTGACCATCCAGGTTGGCGCC
AACGACGGTGAAACTATCGATATCGATCTGAAGCAGATCAACTCTCAGAC
CCTGGGTCTGGACTCACTGAACGTGCAGAAAGCGTATGATGTGAAAGATA
CAGCAGTAACAACGAAAGCTTATGCCAATAATGGTACTACACTGGATGTA
TCGGGTCTTGATGATGCAGCTATTAAAGCGGCTACGGGTGGTACGAATGG
TACGGCTTCTGTAACCGGTGGTGCGGTTAAATTTGACGCAGATAATAACA
AGTACTTTGTTACTATTGGTGGCTTTACTGGTGCTGATGCCGCCAAAAAT
GGCGATTATGAAGTTAACGTTGCTACTGACGGTACAGTAACCCTTGCGGC
TGGCGCAACTAAAACCACAATGCCTGCTGGTGCGACAACTAAAACAGAAG
TACAGGAGTTAAAAGATACACCGGCAGTTGTTTCAGCAGATGCTAAAAAT
GCCTTAATTGCTGGCGGCGTTGACGCTACCGATGCTAATGGCGCTGAGTT
GGTCAAAATGTCTTATACCGATAAAAATGGTAAGACAATTGAAGGCGGTT
ATGCGCTTAAAGCTGGCGATAAGTATTACGCCGCAGATTACGATGAAGCG
ACAGGAGCAATTAAAGCTAAAACTACAAGTTATACTGCTGCTGACGGCAC
TACCAAAACAGCGGCTAACCAACTGGGTGGCGTAGACGGTAAAACCGAAG
TCGTTACTATCGACGGTAAAACCTACAATGCCAGCAAAGCCGCTGGTCAT
GATTTCAAAGCACAACCAGAGCTGGCGGAAGCAGCCGCTAAAACCACCGA
AAACCCGCTGCAGAAAATTGATGCCGCGCTGGCGCAGGTGGATGCGCTGC
GCTCTGATCTGGGTGCGGTACAAAACCGTTTCAACTCTGCTATCACCAAC
CTGGGCAATACCGTAAACAATCTGTCTGAAGCGCGTAGCCGTATCGAAGA
TTCCGACTACGCGACCGAAGTTTCCAACATGTCTCGCGCGCAGATTCTGC
AGCAGGCCGGTACTTCCGTTCTGGCGCAGGCTAACCAGGTCCCGCAGAAC
GTGCTGTCTCTGTTACGT
SEQ ID No:179 HA1-1his (PR8)
MKFLVNVALVFMVVYISYIYASHNGKLCRLKGIAPLQLGKCNIAGWLLGN
PECDPLLPVRSWSYIVETPNSENGICYPGDFIDYEELREQLSSVSSFERF
EIFPKESSWPNHNTNGVTAACSHEGKSSFYRNLLWLTEKEGSYPKLKNSY
VNKKGKEVLVLWGIHHPPNSKEQQNLYQNENAYVSVVTSNYNRRFTPEIA
ERPKVRDQAGRMNYYWTLLKPGDTIIFEANGNLIAPMYAFALSRGFGSGI
ITSNASMHECNTKCQTPLGAINSSLPYQNIHPVTIGECPKYVRHHHHHH
SEQ ID No:180 HA1-1his (VN)
MKFLVNVALVFMVVYISYIYAEKKHNGKLCDLDGVKPLILRDCSVAGWLL
GNPMCDEFINVPEWSYIVEKANPVNDLCYPGDFNDYEELKHLLSRINHFE
KIQIIPKSSWSSHEASLGVSSACPYQGKSSFFRNVVWLIKKNSTYPTIKR
SYNNTNQEDLLVLWGIHHPNDAAEQTKLYQNPTTYISVGTSTLNQRLVPR
IATRSKVNGQSGRMEFFWTILKPNDAINFESNGNFIAPEYAYKIVKKGDS
TIMKSELEYGNCNTKCQTPMGAINSSMPFHNIHPLTIGECPKYVKHHHHH
H
SEQ ID No:181 HA1-1his (IND)
MKFLVNVALVFMVVYISYIYAEKTHNGKLCDLDGVKPLILRDCSVAGWLL
GNPMCDEFINVPEWSYIVEKANPTNDLCYPGSFNDYEELKHLLSRINHFE
KIQIIPKSSWSDHEASSGVSSACPYLGSPSFFRNVVWLIKKNSTYPTIKK
SYNNTNQEDLLVLWGIHHPNDAAEQTRLYQNPTTYISIGTSTLNQRLVPK
IATRSKVNGQSGRMEFFWTILKPNDAINFESNGNFIAPEYAYKIVKKGDS
AIMKSELEYGNCNTKCQTPMGAINSSMPFHNIHPLTIGECPKYVKHHHHH
H
SEQ ID No:182 HA1-1his (NC)
MKFLVNVALVFMVVYISYIYASHNGKLCLLKGIAPLQLGNCSVAGWILGN
PECELLISKESWSYIVETPNPENGTCYPGYFADYEELREQLSSVSSFERF
EIFPKESSWPNHTVTGVSASCSHNGKSSFYRNLLWLTGKNGLYPNLSKSY
VNNKEKEVLVLWGVHHPPNIGNQRALYHTENAYVSVVSSHYSRRFTPEIA
KRPKVRDQEGRINYYWTLLEPGDTIIFEANGNLIAPWYAFALSRGFGSGT
ITSNAPMDECDAKCQTPQGAINSSLPFQNVHPVTIGECPKYVRHHHHHH
SEQ ID No:183 HA1-1 (MAL)
ACCACTACCCCAACCAAATCTCACTTCGCAAACCTGAAAGGCACTGAAAC
CCGTGGCAAGCTGTGTCCGAAGTGTCTGAACTGCACCGATCTGGACGTCG
CACTGGGTCGTCCGAAATGTACTGGTAACATTCCGTCCGCGCGTGTCTCC
ATCCTGCATGAAGTGCGTCCAGTGACCTCCGGCTGTTTTCCGATTATGCA
TGATCGTACTAAAATCCGTCAGCTGCCGAACCTGCTGCGTGGTTACGAAC
ACATTCGTCTGTCCACCCATAACGTTATCAACGCGGAAAACGCGCCGGGC
GGTAGCTATAAAATCGGTACCTCTGGTTCTTGCCCGAACGTGACTAACGG
TAACGGCTTCTTTGCAACCATGGCCTGGGCGGTCCCGAAAAACGACAACA
ACAAGACCGCGACCAATTCCCTGACCATCGAAGTCCCGTATATCTGCACC
GAAGGTGAAGATCAAATCACGGTTTGGGGCTTCCACTCCGACAACGAGGC
ACAAATGGCGAAACTGTACGGTGACAGCAAACCGCAAAAATTCACTAGCT
CCGCTAACGGTGTTACCACCCACTACGTTTCCCAGATCGGTGGTTTCCCA
AACCAGACCGAAGATGGTGGTCTGCCGCAGTCCGGTCGCATCGTTGTAGA
TTATATGGTGCAGAAAAGCGGTAAAACCGGTACCATCACCTACCAGCGTG
GCATCCTGCTGCCGCAGAAAGTTTGGTGCGCTTCCGGTCGTAGCAAAGTA
ATCAAAGGTTCCCTGCCGCTGATCGGTGAAGCAGACTGCCTGCACGAGAA
ATACGGCGGTCTGAACAAAAGCAAGCCGTACTATACCGGCGAACATGCGA
AAGCAATTGGTAACTGTCCAATTTGGGTGAAATAGTAG
SEQ ID No:184 STF2.HA1-1 (MAL)
ATGGCACAAGTAATCAACACTAACAGTCTGTCGCTGCTGACCCAGAATAA
CCTGAACAAATCCCAGTCCGCACTGGGCACCGCTATCGAGCGTCTGTCTT
CTGGTCTGCGTATCAACAGCGCGAAAGACGATGCGGCAGGTCAGGCGATT
GCTAACCGTTTCACCGCGAACATCAAAGGTCTGACTCAGGCTTCCCGTAA
CGCTAACGACGGTATCTCCATTGCGCAGACCACTGAAGGCGCGCTGAACG
AAATCAACAACAACCTGCAGCGTGTGCGTGAACTGGCGGTTCAGTCTGCT
AACAGCACCAACTCCCAGTCTGACCTCGACTCCATCCAGGCTGAAATCAC
CCAGCGCCTGAACGAAATCGACCGTGTATCCGGCCAGACTCAGTTCAACG
GCGTGAAAGTCCTGGCGCAGGACAACACCCTGACCATCCAGGTTGGCGCC
AACGACGGTGAAACTATCGATATCGATCTGAAGCAGATCAACTCTCAGAC
CCTGGGTCTGGACTCACTGAACGTGCAGAAAGCGTATGATGTGAAAGATA
CAGCAGTAACAACGAAAGCTTATGCCAATAATGGTACTACACTGGATGTA
TCGGGTCTTGATGATGCAGCTATTAAAGCGGCTACGGGTGGTACGAATGG
TACGGCTTCTGTAACCGGTGGTGCGGTTAAATTTGACGCAGATAATAACA
AGTACTTTGTTACTATTGGTGGCTTTACTGGTGCTGATGCCGCCAAAAAT
GGCGATTATGAAGTTAACGTTGCTACTGACGGTACAGTAACCCTTGCGGC
TGGCGCAACTAAAACCACAATGCCTGCTGGTGCGACAACTAAAACAGAAG
TACAGGAGTTAAAAGATACACCGGCAGTTGTTTCAGCAGATGCTAAAAAT
GCCTTAATTGCTGGCGGCGTTGACGCTACCGATGCTAATGGCGCTGAGTT
GGTCAAAATGTCTTATACCGATAAAAATGGTAAGACAATTGAAGGCGGTT
ATGCGCTTAAAGCTGGCGATAAGTATTACGCCGCAGATTACGATGAAGCG
ACAGGAGCAATTAAAGCTAAAACTACAAGTTATACTGCTGCTGACGGCAC
TACCAAAACAGCGGCTAACCAACTGGGTGGCGTAGACGGTAAAACCGAAG
TCGTTACTATCGACGGTAAAACCTACAATGCCAGCAAAGCCGCTGGTCAT
GATTTCAAAGCACAACCAGAGCTGGCGGAAGCAGCCGCTAAAACCACCGA
AAACCCGCTGCAGAAAATTGATGCCGCGCTGGCGCAGGTGGATGCGCTGC
GCTCTGATCTGGGTGCGGTACAAAACCGTTTCAACTCTGCTATCACCAAC
CTGGGCAATACCGTAAACAATCTGTCTGAAGCGCGTAGCCGTATCGAAGA
TTCCGACTACGCGACCGAAGTTTCCAACATGTCTCGCGCGCAGATTCTGC
AGCAGGCCGGTACTTCCGTTCTGGCGCAGGCTAACCAGGTCCCGCAGAAC
GTGCTGTCTCTGTTAGCGACCACTACCCCAACCAAATCTCACTTCGCAAA
CCTGAAAGGCACTGAAACCCGTGGCAAGCTGTGTCCGAAGTGTCTGAACT
GCACCGATCTGGACGTCGCACTGGGTCGTCCGAAATGTACTGGTAACATT
CCGTCCGCGCGTGTCTCCATCCTGCATGAAGTGCGTCCAGTGACCTCCGG
CTGTTTTCCGATTATGCATGATCGTACTAAAATCCGTCAGCTGCCGAACC
TGCTGCGTGGTTACGAACACATTCGTCTGTCCACCCATAACGTTATCAAC
GCGGAAAACGCGCCGGGCGGTAGCTATAAAATCGGTACCTCTGGTTCTTG
CCCGAACGTGACTAACGGTAACGGCTTCTTTGCAACCATGGCCTGGGCGG
TCCCGAAAAACGACAACAACAAGACCGCGACCAATTCCCTGACCATCGAA
GTCCCGTATATCTGCACCGAAGGTGAAGATCAAATCACGGTTTGGGGCTT
CCACTCCGACAACGAGGCACAAATGGCGAAACTGTACGGTGACAGCAAAC
CGCAAAAATTCACTAGCTCCGCTAACGGTGTTACCACCCACTACGTTTCC
CAGATCGGTGGTTTCCCAAACCAGACCGAAGATGGTGGTCTGCCGCAGTC
CGGTCGCATCGTTGTAGATTATATGGTGCAGAAAAGCGGTAAAACCGGTA
CCATCACCTACCAGCGTGGCATCCTGCTGCCGCAGAAAGTTTGGTGCGCT
TCCGGTCGTAGCAAAGTAATCAAAGGTTCCCTGCCGCTGATCGGTGAAGC
AGACTGCCTGCACGAGAAATACGGCGGTCTGAACAAAAGCAAGCCGTACT
ATACCGGCGAACATGCGAAAGCAATTGGTAACTGTCCAATTTGGGTGAAA
TAGTAG
SEQ ID No:185 HA1-2 (MAL)
AAAGGCACTGAAACCCGTGGCAAGCTGTGTCCGAAGTGTCTGAACTGCAC
CGATCTGGACGTCGCACTGGGTCGTCCGAAATGTACTGGTAACATTCCGT
CCGCGCGTGTCTCCATCCTGCATGAAGTGCGTCCAGTGACCTCCGGCTGT
TTTCCGATTATGCATGATCGTACTAAAATCCGTCAGCTGCCGAACCTGCT
GCGTGGTTACGAACACATTCGTCTGTCCACCCATAACGTTATCAACGCGG
AAAACGCGCCGGGCGGTAGCTATAAAATCGGTACCTCTGGTTCTTGCCCG
AACGTGACTAACGGTAACGGCTTCTTTGCAACCATGGCCTGGGCGGTCCC
GAAAAACGACAACAACAAGACCGCGACCAATTCCCTGACCATCGAAGTCC
CGTATATCTGCACCGAAGGTGAAGATCAAATCACGGTTTGGGGCTTCCAC
TCCGACAACGAGGCACAAATGGCGAAACTGTACGGTGACAGCAAACCGCA
AAAATTCACTAGCTCCGCTAACGGTGTTACCACCCACTACGTTTCCCAGA
TCGGTGGTTTCCCAAACCAGACCGAAGATGGTGGTCTGCCGCAGTCCGGT
CGCATCGTTGTAGATTATATGGTGCAGAAAAGCGGTAAAACCGGTACCAT
CACCTACCAGCGTGGCATCCTGCTGCCGCAGAAAGTTTGGTGCGCTTCCG
GTCGTAGCAAAGTAATCAAAGGTTGATAG
SEQ ID No:186 STF2.HA1-2 (MAL)
ATGGCACAAGTAATCAACACTAACAGTCTGTCGCTGCTGACCCAGAATAA
CCTGAACAAATCCCAGTCCGCACTGGGCACCGCTATCGAGCGTCTGTCTT
CTGGTCTGCGTATCAACAGCGCGAAAGACGATGCGGCAGGTCAGGCGATT
GCTAACCGTTTCACCGCGAACATCAAAGGTCTGACTCAGGCTTCCCGTAA
CGCTAACGACGGTATCTCCATTGCGCAGACCACTGAAGGCGCGCTGAACG
AAATCAACAACAACCTGCAGCGTGTGCGTGAACTGGCGGTTCAGTCTGCT
AACAGCACCAACTCCCAGTCTGACCTCGACTCCATCCAGGCTGAAATCAC
CCAGCGCCTGAACGAAATCGACCGTGTATCCGGCCAGACTCAGTTCAACG
GCGTGAAAGTCCTGGCGCAGGACAACACCCTGACCATCCAGGTTGGCGCC
AACGACGGTGAAACTATCGATATCGATCTGAAGCAGATCAACTCTCAGAC
CCTGGGTCTGGACTCACTGAACGTGCAGAAAGCGTATGATGTGAAAGATA
CAGCAGTAACAACGAAAGCTTATGCCAATAATGCTACTACACTGGATGTA
TCGGGTCTTGATGATGCAGCTATTAAAGCGGCTACGGGTGGTACGAATGG
TACGGCTTCTGTAACCGGTGGTGCGGTTAAATTTGACGCAGATAATAACA
AGTACTTTGTTACTATTGGTGGCTTTACTGGTGCTGATGCCGCCAAAAAT
GGCGATTATGAAGTTAACGTTGCTACTGACGGTACAGTAACCCTTGCGGC
TGGCGCAACTAAAACCACAATGCCTGCTGGTGCGACAACTAAAACAGAAG
TACAGGAGTTAAAAGATACACCGGCAGTTGTTTCAGCAGATGCTAAAAAT
GCCTTAATTGCTGGCGGCGTTGACGCTACCGATGCTAATGGCGCTGAGTT
GGTCAAAATGTCTTATACCGATAAAAATGGTAAGACAATTGAAGGCGGTT
ATGCGCTTAAAGCTGGCGATAAGTATTACGCCGCAGATTACGATGAAGCG
ACAGGAGCAATTAAAGCTAAAACTACAAGTTATACTGCTGCTGACGGCAC
TACCAAAACAGCGGCTAACCAACTGGGTGGCGTAGACGGTAAAACCGAAG
TCGTTACTATCGACGGTAAAACCTACAATGCCAGCAAAGCCGCTGGTCAT
GATTTCAAAGCACAACCAGAGCTGGCGGAAGCAGCCGCTAAAACCACCGA
AAACCCGCTGCAGAAAATTGATGCCGCGCTGGCGCAGGTGGATGCGCTGC
GCTCTGATCTGGGTGCGGTACAAAACCGTTTCAACTCTGCTATCACCAAC
CTGGGCAATACCGTAAACAATCTGTCTGAAGCGCGTAGCCGTATCGAAGA
TTCCGACTACGCGACCGAAGTTTCCAACATGTCTCGCGCGCAGATTCTGC
AGCAGGCCGGTACTTCCGTTCTGGCGCAGGCTAACCAGGTCCCGCAGAAC
GTGCTGTCTCTGTTAGCGAAAGGCACTGAAACCCGTGGCAAGCTGTGTCC
GAAGTGTCTGAACTGCACCGATCTGGACGTCGCACTGGGTCGTCCGAAAT
GTACTGGTAACATTCCGTCCGCGCGTGTCTCCATCCTGCATGAAGTGCGT
CCAGTGACCTCCGGCTGTTTTCCGATTATGCATGATCGTACTAAAATCCG
TCAGCTGCCGAACCTGCTGCGTGGTTACGAACACATTCGTCTGTCCACCC
ATAACGTTATCAACGCGGAAAACGCGCCGGGCGGTAGCTATAAAATCGGT
ACCTCTGGTTCTTGCCCGAACGTGACTAACGGTAACGGCTTCTTTGCAAC
CATGGCCTGGGCGGTCCCGAAAAACGACAACAACAAGACCGCGACCAATT
CCCTGACCATCGAAGTCCCGTATATCTGCACCGAAGGTGAAGATCAAATC
ACGGTTTGQGGCTTCCACTCCGACAACGAGGCACAAATGGCGAAACTGTA
CGGTGACAGCAAACCGCAAAAATTCACTAGCTCCGCTAACGGTGTTACCA
CCCACTACGTTTCCCAGATCGGTGGTTTCCCAAACCAGACCGAAGATGGT
GGTCTGCCGCAGTCCGGTCGCATCGTTGTAGATTATATGGTGCAGAAAAG
CGGTAAAACCGGTACCATCACCTACCAGCGTGGCATCCTGCTGCCGCAGA
AAGTTTGGTGCGCTTCCGGTCGTAGCAAAGTAATCAAAGGTTGATAG
SEQ ID No:187 HA1-2 (SH)
AAAGGCACTCGTACCCGCGGTAAGCTGTGCCCGGACTGCCTGAACTGTAC
CGATCTGGATGTTGCACTGGGTCGTCCGATGTGCGTTGGTACCACCCCGT
CTGCGAAAGCCAGCATCCTGCACGAAGTTCGCCCGGTTACTTCCGGTTGT
TTCCCGATTATGCATGATCGTACCAAAATTCGTCAGCTGCCAAACCTGCT
GCGTGGCTATGAAAACATTCGTCTGTCCACTCAAAACGTAATCGATGCAG
AAAAAGCGCTGGGTGGCCCGTATCGTCTGGGTACCAGCGGCTCCTGCCCG
AACGCGACGAGCAAAAGCGGCTTCTTCGCCACCATGGCTTGGGCCGTTCC
GAAAGACAACAACAAAAACGCTACGAACCCGCTGACCGTCGAAGTCCCGT
ACATCTGCACCGAAGGCGAAGATCAGATCACTGTGTGGGGCTTCCACAGC
GATGATAAGACCCAGATGAAAAATCTGTACGGTGACTCCAACCCGCAGAA
ATTCACCTCTTCTGCTAACGGTGTAACGACCCACTACGTTTCTCAGATCG
GTGGTTTCCCGGACCAGACGGAAGATGGCGGTCTGCCTCAGTCCGGCCGC
ATCGTAGTTGATTACATGGTCCAGAAACCGGGTAAGACTGGTACCATTGT
TTACCAGCGTGGTGTACTGCTGCCGCAGAAGGTCTGGTGTGCTTCCGGCC
GTTCCAAGGTCATTAAGGGCTGATA
SEQ ID No:188 STF2.HA1-2 (SH)
ATGGCACAAGTAATCAACACTAACAGTCTGTCGCTGCTGACCCAGAATAA
CCTGAACAAATCCCAGTCCGCACTGGGCACCGCTATCGAGCGTCTGTCTT
CTGGTCTGCGTATCAACAGCGCGAAAGACGATGCGGCAGGTCAGGCGATT
GCTAACCGTTTCACCGCGAACATCAAAGGTCTGACTCAGGCTTCCCGTAA
CGCTAACGACGGTATCTCCATTGCGCAGACCACTGAAGGCGCGCTGAACG
AAATCAACAACAACCTGCAGCGTGTGCGTGAACTGGCGGTTCAGTCTGCT
AACAGCACCAACTCCCAGTCTGACCTCGACTCCATCCAGGCTGAAATCAC
CCAGCGCCTGAACGAAATCGACCGTGTATCCGGCCAGACTCAGTTCAACG
GCGTGAAAGTCCTGGCGCAGGACAACACCCTGACCATCCAGGTTGGCGCC
AACGACGGTGAAACTATCGATATCGATCTGAAGCAGATCAACTCTCAGAC
CCTGGGTCTGGACTCACTGAACGTGCAGAAAGCGTATGATGTGAAAGATA
CAGCAGTAACAACGAAAGCTTATGCCAATAATGGTACTACACTGGATGTA
TCGGGTCTTGATGATGCAGCTATTAAAGCGGCTACGGGTGGTACGAATGG
TACGGCTTCTGTAACCGGTGGTGCGGTTAAATTTGACGCAGATAATAACA
AGTACTTTGTTACTATTGGTGGCTTTACTGGTGCTGATGCCGCCAAAAAT
GGCGATTATGAAGTTAACGTTGCTACTGACGGTACAGTAACCCTTGCGGC
TGGCGCAACTAAAACCACAATGCCTGCTGGTGCGACAACTAAAACAGAAG
TACAGGAGTTAAAAGATACACCGGCAGTTGTTTCAGCAGATGCTAAAAAT
GCCTTAATTGCTGGCGGCGTTGACGCTACCGATGCTAATGGCGCTGAGTT
GGTCAAAATGTCTTATACCGATAAAAATGGTAAGACAATTGAAGGCGGTT
ATGCGCTTAAAGCTGGCGATAAGTATTACGCCGCAGATTACGATGAAGCG
ACAGGAGCAATTAAAGCTAAAACTACAAGTTATACTGCTGCTGACGGCAC
TACCAAAACAGCGGCTAACCAACTGGGTGGCGTAGACGGTAAAACCGAAG
TCGTTACTATCGACGGTAAAACCTACAATGCCAGCAAAGCCGCTGGTCAT
GATTTCAAAGCACAACCAGAGCTGGCGGAAGCAGCCGCTAAAACCACCGA
AAACCCGCTGCAGAAAATTGATGCCGCGCTGGCGCAGGTGGATGCGCTGC
GCTCTGATCTGGGTGCGGTACAAAACCGTTTCAACTCTGCTATCACCAAC
CTGGGCAATACCGTAAACAATCTGTCTGAAGCGCGTAGCCGTATCGAAGA
TTCCGACTACGCGACCGAAGTTTCCAACATGTCTCGCGCGCAGATTCTGC
AGCAGGCCGGTACTTCCGTTCTGGCGCAGGCTAACCAGGTCCCGCAGAAC
GTGCTGTCTCTGTTAGCGAAAGGCACTCGTACCCGCGGTAAGCTGTGCCC
GGACTGCCTGAACTGTACCGATCTGGATGTTGCACTGGGTCGTCCGATGT
GCGTTGGTACCACCCCGTCTGCGAAAGCCAGCATCCTGCACGAAGTTCGC
CCGGTTACTTCCGGTTGTTTCCCGATTATGCATGATCGTACCAAAATTCG
TCAGCTGCCAAACCTGCTGCGTGGCTATGAAAACATTCGTCTGTCCACTC
AAAACGTAATCGATGCAGAAAAAGCGCTGGGTGGCCCGTATCGTCTGGGT
ACCAGCGGCTCCTGCCCGAACGCGACGAGCAAAAGCGGCTTCTTCGCCAC
CATGGCTTGGGCCGTTCCGAAAGACAACAACAAAAACGCTACGAACCCGC
TGACCGTCGAAGTCCCGTACATCTGCACCGAAGGCGAAGATCAGATCACT
GTGTGGGGCTTCCACAGCGATGATAAGACCCAGATGAAAAATCTGTACGG
TGACTCCAACCCGCAGAAATTCACCTCTTCTGCTAACGGTGTAACGACCC
ACTACGTTTCTCAGATCGGTGGTTTCCCGGACCAGACGGAAGATGGCGGT
CTGCCTCAGTCCGGCCGCATCGTAGTTGATTACATGGTCCAGAAACCGGG
TAAGACTGGTACCATTGTTTACCAGCGTGGTGTACTGCTGCCGCAGAAGG
TCTGGTGTGCTTCCGGCCGTTCCAAGGTCATTAAGGGCTGATAG
SEQ ID No:189 HA1-2 (Lee)
AAAGGCACTCAGACCCGTGGCAAGCTGTGTCCGAACTGTTTCAACTGCAC
CGATCTGGACGTTGCACTGGGTCGTCCGAAATGCATGGGTAACATCCCGT
CTGCGAAGGTAAGCATCCTGCACGAAGTTAAACCGGTAACCAGCGGCTGT
TTCCCGATCATGCACGACAAAACTAAAATTCGTCAGCTGCCGAACCTGCT
GCGTGGTTATGAGAACATTCGTCTGTCTACCTCTAATGTTATCAACGCGG
AGACTGCACCAGGTGGCCCATACAAAGTAGGTACCAGCGGTTCCTGTCCG
AACGTTGCGAATCGTAACGGCTTCTTCAACACTATGGCGTGGGTTATCCC
GAAAGATAACAATAAAACTGCAATTAACCCGGTAACTGTAGAAGTTCCGT
ACATCTGCTCCGAAGGCGAGGACCAGATTACGGTATGGGGCTTTCACAGC
GACGATAAAACCCAGATGGAGCGTCTGTACGGTGACTCTAACCCGCAGAA
ATTCACCTCCTCCGCGAACGGCGTTACCACCCACTATGTTTCTCAGATCG
GCGGTTTCCCGAATCAGACCGAAGACGAAGGCCTGAAGCAGTCCGGCCGT
ATTGTTGTAGACTACATGGTTCAGAAGCCGGGCAAAACTGGTACCATTGT
ATACCAGCGCGGCATCCTGCTGCCGCAGAAAGTTTGGTGCGCTTCCGGTC
GTAGCAAAGTAATCAAAGGTTGATAG
SEQ ID No:190 STF2.HA1-2 (Lee)
ATGGCACAAGTAATCAACACTAACAGTCTGTCGCTGCTGACCCAGAATAA
CCTGAACAAATCCCAGTCCGCACTGGGCACCGCTATCGAGCGTCTGTCTT
CTGGTCTGCGTATCAACAGCGCGAAAGACGATGCGGCAGGTCAGGCGATT
GCTAACCGTTTCACCGCGAACATCAAAGGTCTGACTCAGGCTTCCCGTAA
CGCTAACGACGGTATCTCCATTGCGCAGACCACTGAAGGCGCGCTGAACG
AAATCAACAACAACCTGCAGCGTGTGCGTGAACTGGCGGTTCAGTCTGCT
AACAGCACCAACTCCCAGTCTGACCTCGACTCCATCCAGGCTGAAATCAC
CCAGCGCCTGAACGAAATCGACCGTGTATCCGGCCAGACTCAGTTCAACG
GCGTGAAAGTCCTGGCGCAGGACAACACCCTGACCATCCAGGTTGGCGCC
AACGACGGTGAAACTATCGATATCGATCTGAAGCAGATCAACTCTCAGAC
CCTGGGTCTGGACTCACTGAACGTGCAGAAAGCGTATGATGTGAAAGATA
CAGCAGTAACAACGAAAGCTTATGCCAATAATGGTACTACACTGGATGTA
TCGGGTCTTGATGATGCAGCTATTAAAGCGGCTACGGGTGGTACGAATGG
TACGGCTTCTGTAACCGGTGGTGCGGTTAAATTTGACGCAGATAATAACA
AGTACTTTGTTACTATTGGTGGCTTTACTGGTGCTGATGCCGCCAAAAAT
GGCGATTATGAAGTTAACGTTGCTACTGACGGTACAGTAACCCTTGCGGC
TGGCGCAACTAAAACCACAATGCCTGCTGGTGCGACAACTAAAACAGAAG
TACAGGAGTTAAAAGATACACCGGCAGTTGTTTCAGCAGATGCTAAAAAT
GCCTTAATTGCTGGCGGCGTTGACGCTACCGATGCTAATGGCGCTGAGTT
GGTCAAAATGTCTTATACCGATAAAAATGGTAAGACAATTGAAGGCGGTT
ATGCGCTTAAAGCTGGCGATAAGTATTACGCCGCAGATTACGATGAAGCG
ACAGGAGCAATTAAAGCTAAAACTACAAGTTATACTGCTGCTGACGGCAC
TACCAAAACAGCGGCTAACCAACTGGGTGGCGTAGACGGTAAAACCGAAG
TCGTTACTATCGACGGTAAAACCTACAATGCCAGCAAAGCCGCTGGTCAT
GATTTCAAAGCACAACCAGAGCTGGCGGAAGCAGCCGCTAAAACCACCGA
AAACCCGCTGCAGAAAATTGATGCCGCGCTGGCGCAGGTGGATGCGCTGC
GCTCTGATCTGGGTGCGGTACAAAACCGTTTCAACTCTGCTATCACCAAC
CTGGGCAATACCGTAAACAATCTGTCTGAAGCGCGTAGCCGTATCGAAGA
TTCCGACTACGCGACCGAAGTTTCCAACATGTCTCGCGCGCAGATTCTGC
AGCAGGCCGGTACTTCCGTTCTGGCGCAGGCTAACCAGGTCCCGCAGAAC
GTGCTGTCTCTGTTAGCGAAAGGCACTCAGACCCGTGGCAAGCTGTGTCC
GAACTGTTTCAACTGCACCGATCTGGACGTTGCACTGGGTCGTCCGAAAT
GCATGGGTAACATCCCGTCTGCGAAGGTAAGCATCCTGCACGAAGTTAAA
CCGGTAACCAGCGGCTGTTTCCCGATCATGCACGACAAAACTAAAATTCG
TCAGCTGCCGAACCTGCTGCGTGGTTATGAGAACATTCGTCTGTCTACCT
CTAATGTTATCAACGCGGAGACTGCACCAGGTGGCCCATACAAAGTAGGT
ACCAGCGGTTCCTGTCCGAACGTTGCGAATCGTAACGGCTTCTTCAACAC
TATGGCGTGGGTTATCCCGAAAGATAACAATAAAACTGCAATTAACCCGG
TAACTGTAGAAGTTCCGTACATCTGCTCCGAAGGCGAGGACCAGATTACG
GTATGGGGCTTTCACAGCGACGATAAAACCCAGATGGAGCGTCTGTACGG
TGACTCTAACCCGCAGAAATTCACCTCCTCCGCGAACGGCGTTACCACCC
ACTATGTTTCTCAGATCGGCGGTTTCCCGAATCAGACCGAAGACGAAGGC
CTGAAGCAGTCCGGCCGTATTGTTGTAGACTACATGGTTCAGAAGCCGGG
CAAAACTGGTACCATTGTATACCAGCGCGGCATCCTGCTGCCGCAGAAAG
TTTGGTGCGCTTCCGGTCGTAGCAAAGTAATCAAAGGTTGATAG
SEQ ID No:191 HA1-2 (Ohio)
AAAGGCACTAAAACCCGTGGCAAGCTGTGTCCGAAGTGTCTGAACTGCAC
CGATCTGGACGTCGCACTGGGTCGTCCGAAATGTACTGGTAACATTCCGT
CCGCGGAAGTCTCCATCCTGCATGAAGTGCGTCCAGTGACCTCCGGCTGT
TTTCCGATTATGCATGATCGTACTAAAATCCGTCAGCTGCCGAACCTGCT
GCGTGGTTACGAACACATTCGTCTGTCCACCCATAACGTTATCAACGCGG
AAAAGGCGCCGGGCGGTCCCTATAAAATCGGTACCTCTGGTTCTTGCCCG
AACGTGACTAACGGTAACGGCTTCTTTGCAACCATGGCCTGGGCGGTCCC
GAAAAACGACAACAACAAGACCGCGACCAATTCCCTGACCATCGAAGTCC
CGTATATCTGCACCGAAGGTGAAGATCAAATCACGATTTGGGGCTTCCAC
TCCGACAGCGAGACACAAATGGCGAAACTGTACGGTGACAGCAAACCGCA
AAAATTCACTAGCTCCGCTAACGGTGTTACCACCCACTACGTTTCCCAGA
TCGGTGGTTTCCCAAACCAGACCGAAGATGGTGGTCTGCCGCAGTCCGGT
CGCATCGTTGTAGATTATATGGTGCAGAAAAGCGGTAAAACCGGTACCAT
CACCTACCAGCGTGGCATCCTGCTGCCGCAGAAAGTTTGGTGCGCTTCCG
GTCGTAGCAAAGTAATCAAAGGTTGATAG
SEQ ID No:192 STF2.HA1-2 (Ohio)
ATGGCACAAGTAATCAACACTAACAGTCTGTCGCTGCTGACCCAGAATAA
CCTGAACAAATCCCAGTCCGCACTGGGCACCGCTATCGAGCGTCTGTCTT
CTGGTCTGCGTATCAACAGCGCGAAAGACGATGCGGCAGGTCAGGCGATT
GCTAACCGTTTCACCGCGAACATCAAAGGTCTGACTCAGGCTTCCCGTAA
CGCTAACGACGGTATCTCCATTGCGCAGACCACTGAAGGCGCGCTGAACG
AAATCAACAACAACCTGCACCGTGTGCGTGAACTGGCGGTTCAGTCTGCT
AACAGCACCAACTCCCAGTCTGACCTCGACTCCATCCAGGCTGAAATCAC
CCAGCGCCTGAACGAAATCGACCGTGTATCCGGCCAGACTCAGTTCAACG
GCGTGAAAGTCCTGGCGCAGGACAACACCCTGACCATCCAGGTTGGCGCC
AACGACGGTGAAACTATCGATATCGATCTGAAGCAGATCAACTCTCAGAC
CCTGGGTCTGGACTCACTGAACGTGCAGAAAGCGTATGATGTGAAAGATA
CAGCAGTAACAACGAAAGCTTATGCCAATAATGGTACTACACTGGATGTA
TCGGGTCTTGATGATGCAGCTATTAAAGCGGCTACGGGTGGTACGAATGG
TACGGCTTCTGTAACCGGTGGTGCGGTTAAATTTGACGCAGATAATAACA
AGTACTTTGTTACTATTGGTGGCTTTACTGGTGCTGATGCCGCCAAAAAT
GGCGATTATGAAGTTAACGTTGCTACTGACGGTACAGTAACCCTTGCGGC
TGGCGCAACTAAAACCACAATGCCTGCTGGTGCGACAACTAAAACAGAAG
TACAGGAGTTAAAAGATACACCGGCAGTTGTTTCAGCAGATGCTAAAAAT
GCCTTAATTGCTGGCGGCGTTGACGCTACCGATGCTAATGGCGCTGAGTT
GGTCAAAATGTCTTATACCGATAAAAATGGTAAGACAATTGAAGGCGGTT
ATGCGCTTAAAGCTGGCGATAAGTATTACGCCGCAGATTACGATGAAGCG
ACAGGAGCAATTAAAGCTAAAACTACAAGTTATACTGCTGCTGACGGCAC
TACCAAAACAGCGGCTAACCAACTGGGTGGCGTAGACGGTAAAACCGAAG
TCGTTACTATCGACGGTAAAACCTACAATGCCAGCAAAGCCGCTGGTCAT
GATTTCAAAGCACAACCAGAGCTGGCGGAAGCAGCCGCTAAAACCACCGA
AAACCCGCTGCAGAAAATTGATGCCGCGCTGGCGCAGGTGGATGCGCTGC
GCTCTGATCTGGGTGCGGTACAAAACCGTTTCAACTCTGCTATCACCAAC
CTGGGCAATACCGTAAACAATCTGTCTGAAGCGCGTAGCCGTATCGAAGA
TTCCGACTACGCGACCGAAGTTTCCAACATGTCTCGCGCGCAGATTCTGC
AGCAGGCCGGTACTTCCGTTCTGGCGCAGGCTAACCAGGTCCCGCAGAAC
GTGCTGTCTCTGTTAGCGAAAGGCACTAAAACCCGTGGCAAGCTGTGTCC
GAAGTGTCTGAACTGCACCGATCTGGACGTCGCACTGGGTCGTCCGAAAT
GTACTGGTAACATTCCGTCCGCGGAAGTCTCCATCCTGCATGAAGTGCGT
CCAGTGACCTCCGGCTGTTTTCCGATTATGCATGATCGTACTAAAATCCG
TCAGCTGCCGAACCTGCTGCGTGGTTACGAACACATTCGTCTGTCCACCC
ATAACGTTATCAACGCGGAAAAGGCGCCGGGCGGTCCCTATAAAATCGGT
ACCTCTGGTTCTTGCCCGAACGTGACTAACGGTAACGGCTTCTTTGCAAC
CATGGCCTGGGCGGTCCCGAAAAACGACAACAACAAGACCGCGACCAATT
CCCTGACCATCGAAGTCCCGTATATCTGCACCGAAGGTGAAGATCAAATC
ACGATTTGGGGCTTCCACTCCGACAGCGAGACACAAATGGCGAAACTGTA
CGGTGACAGCAAACCGCAAAAATTCACTAGCTCCGCTAACGGTGTTACCA
CCCACTACGTTTCCCAGATCGGTGGTTTCCCAAACCAGACCGAAGATGGT
GGTCTGCCGCAGTCCGGTCGCATCGTTGTAGATTATATGGTGCAGAAAAG
CGGTAAAACCGGTACCATCACCTACCAGCGTGGCATCCTGCTGCCGCAGA
AAGTTTGGTGCGCTTCCGGTCGTAGCAAAGTAATCAAAGGTTGATAG
SEQ ID No:193 FOR PRIMER
CGGATAACAATTCCCCTCTAG
SEQ ID No:194 REV PRIMER
CGAAGTGAGATTTGGTTGGAGTAGTGGTCGCTAACAGAGACAGCACGTTC
SEQ ID No:195 FOR PRIMER
CCCGCAGAACGTGCTGTCTCTGTTAGCGACCACTACCCCAACCAAATCTC
SEQ ID No:196 REV PRIMER
CTATTTCACCCAAATTGGAC
SEQ ID No:197 REV PRIMER
CACAGCTTGCCACGGGTTTCAGTGCCTTTCGCTAACAGAGACAGCACGTT
C
SEQ ID No:198 FOR PRIMER
CCCGCAGAACGTGCTGTCTCTGTTAGCGAAAGGCACTGAAACCCGTGGC
SEQ ID No:199 REV PRIMER
GACTAGACGCTCAGCTATCAACCTTTGATTACTTTGCTACGACC
SEQ ID No:200 REV PRIMER
CACAGCTTACCGCGGGTACGAGTGCCTTTCGCTAACAGAGACAGCACGTT
C
SEQ ID No:201 FOR PRIMER
CGGGATCCAAAGGCACTCGTACCCGCGGTAAG
SEQ ID No:202 REV PRIMER
GACTAGACGCTCAGCTATCAGCCCTTAATGACCTTGGAACGGCC
SEQ ID No:203 REV PRIMER
GCATAGTTTTCCTCTGGTCTGTGTTCCTTTCGCTAACAGAGACAGCACGT
TC
SEQ ID No:204 FOR PRIMER
AAAGGAACACAGACCAGAGG
SEQ ID No:205 REV PRIMER
CTACTACCCTTTTATTACCTTGCTCC
SEQ ID No:206 REV PRIMER
CACAGCTTGCCACGGGTTTTAGTGCCTTTCGCTAACAGAGACAGCACGTT
C
SEQ ID No:207 FOR PRIMER
AAAGGCACTAAAACCCGTGGC
SEQ ID No:208 REV PRIMER
GACTAGACGCTCAGCTATCAACCTTTGATTACTTTGCTACGACC
SEQ ID NO:209 STF2.HA1-1 (MAL)
MAQVINTNSLSLLTQNNLNKSQSALGTAIERLSSGLRINSAKDDAAGQAI
ANRFTANIKGLTQASRNANDGISIAQTTEGALNEINNNLQRVRELAVQSA
NSTNSQSDLDSIQAEITQRLNEIDRVSGQTQFNGVKVLAQDNTLTIQVGA
NDGETIDIDLKQINSQTLGLDSLNVQKAYDVKDTAVTTKAYANNGTTLDV
SGLDDAAIKAATGGTNGTASVTGGAVKFDADNNKYFVTIGGFTGADAAKN
GDYEVNVATDGTVTLAAGATKTTMPAGATTKTEVQELKDTPAVVSADAKN
ALTAGGVDATDANGAELVKMSYTDKNGKTIEGGYALKAGDKYYAADYDEA
TGAIKAKTTSYTAADGTTKTAANQLGGVDGKTEVVTIDGKTYNASKAAGH
DFKAQPELAEAAAKTTENPLQKIDAALAQVDALRSDLGAVQNRFNSAITN
LGNTVNNLSEARSRIEDSDYATEVSNMSRAQILQQAGTSVLAQANQVPQN
VLSLLATTTPTKSHFANLKGTETRGKLCPKCLNCTDLDVALGRPKCTGNI
PSARVSILHEVRPVTSGCFPIMHDRTKIRQLPNLLRGYEHIRLSTHNVIN
AENAPGGSYKIGTSGSCPNVTNGNGFFATMAWAVPKNDNNKTATNSLTIE
VPYICTEGEDQITVWGFHSDNEAQMAKLYGDSKPQKFTSSANGVTTHYVS
QIGGFPNQTEDGGLPQSGRIVVDYMVQKSGKTGTITYQRGILLPQKVWCA
SGRSKVIKGSLPLIGEADCLHEKYGGLNKSKPYYTGEHAKAIGNCPIWVK
SEQ ID NO:210 STF2.HA1-2 (MAL)
MAQVINTNSLSLLTQNNLNKSQSALGTAIERLSSGLRINSAKDDAAGQAI
ANRFTANIKGLTQASRNANDGISIAQTTEGALNEINNNLQRVRELAVQSA
NSTNSQSDLDSIQAEITQRLNEIDRVSGQTQFNGVKVLAQDNTLTIQVGA
NDGETIDIDLKQINSQTLGLDSLNVQKAYDVKDTAVTTKAYANNGTTLDV
SGLDDAAIKAATGGTNGTASVTGGAVKFDADNNKYFVTIGGFTGADAAKN
GDYEVNVATDGTVTLAAGATKTTMPAGATTKTEVQELKDTPAVVSADAKN
ALIAGGVDATDANGAELVKMSYTDKNGKTIEGGYALKAGDKYYAADYDEA
TGAIKAKTTSYTAADGTTKTAANQLGGVDGKTEVVTIDGKTYNASKAAGH
DFKAQPELAEAAAKTTENPLQKIDAALAQVDALRSDLGAVQNRFNSAITN
LGNTVNNLSEARSRIEDSDYATEVSNMSRAQILQQAGTSVLAQANQVPQN
VLSLLAKGTETRGKLCPKCLNCTDLDVALGRPKCTGNIPSARVSILHEVR
PVTSGCFPTMHDRTKIRQLPNLLRGYEHIRLSTHNVINAENAPGGSYKIG
TSGSCPNVTNGNGFFATMAWAVPKNDNNKTATNSLTIEVPYICTEGEDQI
TVWGFHSDNEAQMAKLYGDSKPQKFTSSANGVTTHYVSQIGGFPNQTEDG
GLPQSGRIVVDYMVQKSGKTGTITYQRGILLPQKVWCASGRSKVIKG
SEQ ID NO:211 STF2.HA1-2 (SH)
MAQVINTNSLSLLTQNNLNKSQSALGTAIERLSSGLRINSAKDDAAGQAI
ANRFTANIKGLTQASRNANDGTSIAQTTEGALNEINNNLQRVRELAVQSA
NSTNSQSDLDSIQAEITQRLNEIDRVSGQTQFNGVKVLAQDNTLTIQVGA
NDGETIDIDLKQINSQTLGLDSLNVQKAYDVKDTAVTTKAYANNGTTLDV
SGLDDAAIKAATGGTNGTASVTGGAVKFDADNNKYFVTIGGFTGADAAKN
GDYEVNVATDGTVTLAAGATKTTMPAGATTKTEVQELKDTPAVVSADAKN
ALIAGGVDATDANGAELVKMSYTDKNGKTIEGGYALKAGDKYYAADYDEA
TGAIKAKTTSYTAADGTTKTAANQLGGVDGKTEVVTIDGKTYNASKAAGH
DFKAQPELAEAAAKTTENPLQKIDAALAQVDALRSDLGAVQNRFNSAITN
LGNTVNNLSEARSRIEDSDYATEVSNMSRAQILQQAGTSVLAQANQVPQN
VLSLLAKGTRTRGKLCPDCLNCTDLDVALGRPMCVGTTPSAKASILHEVR
PVTSGCFPIMHDRTKIRQLPNLLRGYENIRLSTQNVIDAEKALGGPYRLG
TSGSCPNATSKSGFFATMAWAVPKDNNKNATNPLTVEVPYICTEGEDQIT
VWGFHSDDKTQMKNLYGDSNPQKFTSSANGVTTHYVSQIGGFPDQTEDGG
LPQSGRIVVDYMVQKPGKTGTIVYQRGVLLPQKVWCASGRSKVIKG
SEQ ID NO:212 STF2
ATGGCACAAGTAATCAACACTAACAGTCTGTCGCTGCTGACCCAGAATAA
CCTGAACAAATCCCAGTCCGCACTGGGCACCGCTATCGAGCGTCTGTCTT
CTGGTCTGCGTATCAACAGCGCGAAAGACGATGCGGCAGGTCAGGCGATT
GCTAACCGTTTCACCGCGAACATCAAAGGTCTGACTCAGGCTTCCCGTAA
CGCTAACGACGGTATCTCCATTGCGCAGACCACTGAAGGCGCGCTGAACG
AAATCAACAACAACCTGCAGCGTGTGCGTGAACTGGCGGTTCAGTCTGCT
AACAGCACCAACTCCCAGTCTGACCTCGACTCCATCCAGGCTGAAATCAC
CCAGCGCCTGAACGAAATCGACCGTGTATCCGGCCAGACTCAGTTCAACG
GCGTGAAAGTCCTGGCGCAGGACAACACCCTGACCATCCAGGTTGGCGCC
AACGACGGTGAAACTATCGATATCGATCTGAAGCAGATCAACTCTCAGAC
CCTGGGTCTGGACTCACTGAACGTGCAGAAAGCGTATGATGTGAAAGATA
CAGCAGTAACAACGAAAGCTTATGCCAATAATGGTACTACACTGGATGTA
TCGGGTCTTGATGATGCAGCTATTAAAGCGGCTACGGGTGGTACGAATGG
TACGGCTTCTGTAACCGGTGGTGCGGTTAAATTTGACGCAGATAATAACA
AGTACTTTGTTACTATTGGTGGCTTTACTGGTGCTGATGCCGCCAAAAAT
GGCGATTATGAAGTTAACGTTGCTACTGACGGTACAGTAACCCTTGCGGC
TGGCGCAACTAAAACCACAATGCCTGCTGGTGCGACAACTAAAACAGAAG
TACAGGAGTTAAAAGATACACCGGCAGTTGTTTCAGCAGATGCTAAAAAT
GCCTTAATTGCTGGCGGCGTTGACGCTACCGATGCTAATGGCGCTGAGTT
GGTCAAAATGTCTTATACCGATAAAAATGGTAAGACAATTGAAGGCGGTT
ATGCGCTTAAAGCTGGCGATAAGTATTACGCCGCAGATTACGATGAAGCG
ACAGGAGCAATTAAAGCTAAAACTACAAGTTATACTGCTGCTGACGGCAC
TACCAAAACAGCGGCTAACCAACTGGGTGGCGTAGACGGTAAAACCGAAG
TCGTTACTATCGACGGTAAAACCTACAATGCCAGCAAAGCCGCTGGTCAT
GATTTCAAAGCACAACCAGAGCTGGCGGAAGCAGCCGCTAAAACCACCGA
AAACCCGCTGCAGAAAATTGATGCCGCGCTGGCGCAGGTGGATGCGCTGC
GCTCTGATCTGGGTGCGGTACAAAACCGTTTCAACTCTGCTATCACCAAC
CTGGGCAATACCGTAAACAATCTGTCTGAAGCGCGTAGCCGTATCGAAGA
TTCCGACTACGCGACCGAAGTTTCCAACATGTCTCGCGCGCAGATTCTGC
AGCAGGCCGGTACTTCCGTTCTGGCGCAGGCTAACCAGGTCCCGCAGAAC
GTGCTGTCTCTGTTACGT
SEQ ID NO:213 B/Yamagata/16/18 HA
MKAIIVLLMVVTSNADRICTGITSSNSPHVVKTATQGEVNVTGVIPLTTT
PTKSHFANLKGTKTRGKLCPNCLNCTDLDVALGRPMCMGTIPSAKASILH
EVRPVTSGCFPIMHDRTKIRQLPNLLRGYENIRLSTHNVINAERAPGGPY
RLGTSGSCPNVTSRNGFFATMAWAVPRDNKTATNPLTVEVPYICTKGEDQ
ITVWGFHSDDKTQMKNLYGDSNPQKFTSSANGVTTHYVSQIGDFPNQTED
GGLPQSGRIVVDYMVQKPGKTGTIVYQRGVLLPQKVWCASGRSKVIKGSL
PLIGEADCLHEKYGGLNKSKPYYTGEHAKAIGNCPIWVKTPLKLANGTKY
RPPAKLLKERGFFGAIAGFLEGGWEGMIAGWHGYTSHGAHGVAVAADLKS
TQEAINKITKNLNSLSELEVKNLQRLSGAMDELHNEILELDEKVDDLRAD
TISSQIELAVLLSNEGIINSEDEHLLALERKLKKMLGPSAVDIGNGCFET
KHKCNQTCLDRIAAGTFNAGEFSLPTFDSLNITAASLNDDGLDNHTILLY
YSTAASSLAVTLMIAIFIVYMVSRDNVSCSICL
SEQ ID NO:787 B/Victoria/2/87 HA
MKAIIVLLMVVTSNADRICTGITSSNSPHVVKTATQGEVNVTGVIPLTTT
PTKSHFANLKGTKTRGKLCPKCLNCTDLDVALGRPKCTGTIPSAKASILH
EVKPVTSGCFPIMHDRTKIRQLPNLLRGYEHIRLSTHNVINAETAPGGPY
KVGTSGSCPNVTNGNGFFATMAWAVPKNDNNKTATNPLTVEVPYICTEGE
DQITVWGFHSDNEAQMVKLYGDSKPQKFTSSANGVTTHYVSQIGGFPNQA
EDGGLPQSGRIVVDYMVQKSGKTGTITYQRGILLPQKVWCASGRSKVIKG
SLPLIGEADCLHEKYGGLNKSKPYYTGEHAKAIGNCPIWVKTPLKLANGT
KYRPPAKLLKEKGFFGAIAGFLEGGWEGMIAGWHGYTSHGAHGVAVAADL
KSTQEAINKITKNLNSLSELEVKNLQRLSGAMDELHNKILELDEKVDDLR
ADTISSQIELAVLLSNEGIINSEDEHLLALERKLKKMLGPSAVEIGNGCF
ETKHKCNQTCLDRIAAGTFNAGEFSLPTFDSLNITAASLNDDGLDNHTIL
LYYSTAASSLAVTLMIAIFIVYMVSRDNVSCSICL

### Example 13 Flagellin Proteins with Engineered Cysteine Residues for Chemical Conjugation

[0561] The crystal structure for the bacterial flagellin S. typhimurium flagellin type 2 (STF2, SEQ ID NO: 312) has been reported (Yonekura, K., et al., Nature 424:643-650 (2003)). Complete atomic model of the bacterial flagellar filament by electron cryomicroscopy has been reported, and the most detailed structure-function study of the TLR5 activation was based on this structure (Smith, K. D., et al., Nature Immunology 4:1247-1253 (2003)). Toll-like Receptor 5 (TLR5) recognizes a conserved site on flagellin required for protofilament formation and bacterial motility (Nature Immunology 4(12):1247-1253). Mutational analysis demonstrated that the TLR5 activity of flagellin resides in two regions in the N- and C-terminal domains, stretches of 39 and 31 amino acids, respectively (Smith, et al.). These regions are highlighted in grey in FIG. 18. Alanine-scanning mutagenesis of these regions identified a number of mutations which reduced TLR5 activation, but no single mutation completely abrogated activity, suggesting that there is a degree of flexibility or redundancy in the TLR5 binding site. This makes sense from an evolutionary perspective, otherwise the bacteria could easily evolve to evade detection by TLR5. Deletion of the hypervariable hinge region and retention of the conserved N- and C-terminal domains results in a protein (STF2Δ) that retains full TLR5 activity, demonstrating that the N- and C-terminal domains (together) are necessary and sufficient for TLR5 activation.

[0562] Lysine residues are convenient substrates for chemical conjugation of diverse chemical structures to a protein carrier such as flagellin. Of the 30 lysine residues in STF2 (SEQ ID NO: 312), only one lies within the experimentally-defined TLR5 activation site, and this particular lysine is not conserved among all bacterial flagellins (Smith, et al., Nature Immunology 4:1247-1253 (2003)). Of the remaining 29 lysines, 24 are located in the hypervariable hinge region of flagellin, thus leaving only 5 lysine residues in STF2Δ (SEQ ID NO: 313). The structure in FIGS. 19 and 20 shows that most lysines are spatially distal to the TLR5 activation domain, thus it would seem that lysines could be randomly conjugated with peptide or carbohydrate antigens with a reasonable probability of not interfering with the TLR5 activity of the resulting conjugated STF2Δ (SEQ ID NO: 313) protein. Five lysines appear to border the TLR5 activation site quite closely; these residues would be the first to consider mutating if antigen conjugation to lysine affects TLR5 activity.

[0563] Possible additional sites for conjugation (such as cysteines or additional lysines) may be engineered into full-length flagellin (STF2 (SEQ ID NO: 312)) or STF2Δ (SEQ ID NO: 313) by placing such residues in the hypervariable region or in the tail of the conserved N- and C-terminal domains distal to the TLR5 binding site. Chemical methods for conjugation to other amino acids also exist. These include carboxy amino acids (glutamic acid, aspartic acid) and the carboxyl terminal amino acid, arginine, histidine, tryptophan, tyrosine, and serine. Any of these strategies may be utilized to conjugate antigenic structures to flagellin without interfering with the TLR5 activation site.

[0564] Some types of antigens including polysaccharides are not amenable to recombinant fusion DNA technology nor to synthetic peptide chemistry, and thus cannot be genetically or synthetically linked to a ligand for a Toll-like Receptor (TLR). In addition, it is possible that genetic or synthetic fusion of a peptide to a TLR ligand may inhibit the proper folding of the TLR ligand. Chemical conjugation of the antigen to the TLR ligand, which is folded and purified, may be useful. The chemical conjugation of peptide antigens also permits the placement of antigen at specific sites on the TLR ligand, thus limiting interference with receptor binding of the TLR ligand or maximizing exposure to antigen receptors. The conjugation of many peptide antigens to a TLR ligand may also maximize immunogenicity by increasing the conformational heterogeneity with which antigen is presented to the immune system. To provide a site for chemical conjugation of such antigens to flagellin, a cysteine residue was engineered at different sites in the gene encoding STF2Δ (flagellin with the hypervariable hinge region deleted; SEQ ID NO: 313 and SEQ ID NO: 314).

### Materials and Methods

[0565] Polymerase chain reaction (PCR): Platinum® PCR SuperMix High Fidelity kit (catalog number 12532-016, Invitrogen Corporation, Carlsbad, Calif.) was used for all PCR amplifications using the following protocol based on the manufacturer's instructions.
[0566] 1. The following components were added in any order to each reaction tube:
   [0567] a. 45 μl Platinum® PCR SuperMix High Fidelity (PCR reaction buffer)
   [0568] b. Primer solution (10 pMol final concentration of each primer)
   [0569] c. Template DNA solution (10 ng plasmid DNA)
[0570] 2. Reaction volume was made up to 50 μl with water
[0571] 3. Tubes were capped and loaded in thermal cycler
[0572] 4. Tubes were incubated at 94° C. for 30 to 120 seconds to completely denature the template and activate the enzyme
[0573] 5. The following PCR amplification was performed for 25-35 cycles:
   [0574] a. Denature at 94° C. for 15-30 seconds
   [0575] b. Anneal at 50-55° C. for 15-30 seconds
   [0576] c. Extend at 68-72° C. for 1 minute per kb of PCR product size
   [0577] d. If necessary, cool to 4° C. and hold until ready for next process

[0578] Construction of STF2Δ gene (SEQ ID NO: 314): Full length flagellin of Salmonella typhimurium fljb (STF2, SEQ ID NO: 312) is encoded by a 1.5 kb gene (SEQ ID NO: 315). To generate STF2Δ (SEQ ID NO: 314), the sequence corresponding to the hypervariable hinge region (amino acids 170 to 415 of SEQ ID NO: 312) was deleted and replaced with a short flexible linker (GAPVDPASPW (SEQ ID NO: 336)) designed to facilitate interactions of the NH2 and COOH terminal sequences of STF2 (SEQ ID NO: 315) necessary for TLR5 signaling (Smith, K. D., et al., (2004). Toll-like Receptor 5 recognizes a conserved site on flagellin required for protofilament formation and bacterial motility (Smith, et al., Nature Immunology 4:1247-53 (2003)).

[0579] To generate the STF2Δ plasmid, a two-step PCR was used (FIG. 21). In the first reaction, a plasmid encoding STF2.OVA (a fusion of full-length STF2 with full-length ovalbumin, SEQ ID NO: 316) was mixed with primers STF28BGF-1 (SEQ ID NO: 317) and STF28MCR-1 (SEQ ID NO: 318) in PCR reaction buffer, and the mixture was amplified in a PCR reaction as described above. In a parallel reaction, STF2.OVA template plasmid was mixed with primers STF28.MCF-2 (SEQ ID NO: 319) and STF28ECR-2 (SEQ ID NO: 320) in PCR reaction buffer, and the mixture was amplified in a PCR reaction as described above.

[0580] The PCR amplification reactions generated ˜500 bp and 270 bp fragments, respectively. These PCR products were combined with primers STF28BGF-1 (SEQ ID NO: 317) and STF28ECR-2 (SEQ ID NO: 320) in PCR reaction buffer, and the mixture was amplified in a PCR reaction as described above. The amplified DNA product from this reaction (770 bp) was digested with BglII and EcoRI restriction enzymes for 2 hours at 37° C., and ligated into pMTBiP/V5-His B (Invitrogen, Carlsbad, Calif.) that had previously been digested with BglII and EcoRI and treated with calf intestinal phosphatase (CIP). An aliquot of the ligation mix was used to transform E. coli TOP10 cells. The resultant construct pMT/STF2Δ was used to generate the cysteine modified STF2Δ constructs.

[0581] Construction of STF2Δ genes engineered to express a single cysteine residue: To introduce cysteine residues at defined positions in the STF2 polypeptide, pMT/STF2Δ was used as a template in PCR with primer pairs as defined below.

[0582] To construct the STF2Δ.3′Cys (SEQ ID NO: 325) plasmid, pMT/STF2Δ plasmid was mixed with 3′Forward1 (SEQ ID NO: 321) and 3′Reverse1 (SEQ ID NO: 322) primers in PCR reaction buffer, and the mixture was amplified in a PCR reaction as described above.

[0583] To construct the 5′Cys.STF2Δ (SEQ ID NO: 326) plasmid, pMT/STF2Δ plasmid was mixed with 5′Forward2 (SEQ ID NO: 323) and 5′Reverse2 (SEQ ID NO: 324) primers in PCR reaction buffer, and the mixture was amplified in a PCR reaction as described above.

[0584] For STF2Δ.3′Cys (SEQ ID NO: 325) and 5′Cys.STF2Δ (SEQ ID NO: 326) constructs, the PCR products generated were digested with Nde1 and Blp1 restriction enzymes and purified by agarose gel electrophoresis. The purified fragments were ligated by compatible ends to pET24a (Novagen, Madison, Wis.) plasmid DNA that had been previously digested with Nde1 and Blp1 restriction enzymes and CIP-treated. The resulting constructs are designated pET/STF2Δ.3′Cys and pET/5′Cys.STF2Δ, respectively.

[0585] To construct the STF2Δ.HingeCys (SEQ ID NO: 331) plasmid, a two step PCR similar to that described in FIG. 18 was employed. One fragment was generated by mixing pMT/STF2Δ with paired HingeForward1 (SEQ ID NO: 327) and HingeReverse3 (SEQ ID NO: 328) primers in PCR reaction buffer, and the mixture was amplified in a PCR reaction as described above. Another fragment was generated by mixing pMT/STF2Δ with paired HingeForward2 (SEQ ID NO: 329) and HingeReverse4 (SEQ ID NO: 330) primers in PCR reaction buffer, and the mixture was amplified in a PCR reaction as described above. Aliquots from each of these PCR reactions were combined and mixed with HingeForward1 (SEQ ID NO: 327) and HingeReverse4 (SEQ ID NO: 330) primers in PCR reaction buffer, and the mixture was amplified in a PCR reaction as described above. The final PCR product was purified by agarose gel electrophoresis and digested with Nde1 and Blp1, and the purified fragment was ligated into the pET24a vector as described above. The resulting construct is designated pET/STF2Δ.HingeCys.

[0586] Protein expression: Plasmids pET/STF2Δ.3′Cys, pET/5′Cys.STF2Δ, and pET/STF2Δ.HingeCys were transformed into competent E. coli BLR(DE3) cells as follows. To a 1.5-ml snap-cap polypropylene tubes pre-chilled on ice was added 20 μl aliquot of BLR (DE3) cells and 1 μl plasmid DNA (1 μg/μl), and the mixture was incubated for 30 minutes. The tubes were heated for exactly 30 seconds in a 42° C. water bath without shaking, and then placed on ice for an additional 2 minutes. To each tube of heat shocked cells were added 250 μl of room temperature SOC medium.

[0587] The cells were recovered at 37° C. (shaking at 250 rpm) for 60 minutes prior to plating on selective media containing kanamycin. Various ailquots (50-100 μl) of the transformation mix were plated and the plates were incubated at 37° C. for 15 to 18 hours. Colonies were picked and inoculated into 2 ml Luria-Bertani (LB) broth supplemented with 25 μg/ml kanamycin and 12.5 μg/ml tetracycline, and cultured overnight. Fresh LB cultures were inoculated by diluting an aliquot of the overnight cultures 1:100 and cultured at 37° C. with shaking. When the OD₆₀₀ of the culture reached 0.6 to 1.0, protein expression was induced by the addition of isopropyl thio-β-D-galactoside (IPTG) to a final concentration of 1 mM. Several hours after induction, the cells were harvested for analysis of protein expression by SDS-PAGE. Glycerol stocks were prepared from cultures grown in LB supplemented with 0.5% glucose, 25 μg/ml kanamycin and 12.5 μg/ml tetracycline and were frozen at −80° C. following the addition of glycerol (7% final).

[0588] Protein purification: Proteins STF2Δ.3′Cys (SEQ ID NO: 332) and STF2Δ.HingeCys (SEQ ID NO: 333) were expressed and purified as follows. Glycerol stocks of E. coli BLR(DE3) cells harboring the desired plasmids were inoculated into 10 L shake-flasks containing LB and incubated at 37° C. with constant shaking. When cultures reached an optical density of A₆₀₀=0.8, protein expression was induced by the addition of 1 mM IPTG and cultures were incubated at 37° C. with constant shaking for 4 hours before harvesting. Cells were collected from 10 L of culture by low-speed centrifugation at 5,000 rpm (SLA3000 rotor) for 10 minutes and suspended in 50 mM Tris-HCl pH 8.0, 1 mM EDTA, 1 mM DTT (100 ml/10 L).

[0589] The cells were disrupted by passing the cell suspension twice through a microfluidizer at 18,000 psi. The insoluble material was separated from soluble proteins by centrifugation at 10,000 rpm (SS34 rotor) for 15 minutes. Under the culture conditions described, all STF2Δ proteins fractionated with the insoluble material and formed stable inclusion bodies that were collected as a solid pellet following centrifugation. The inclusion bodies were washed twice with 50 mM Tris-HCl, pH 8.0, 0.1 M NaCl and 0.5% Triton X-100, followed by two washes with the same buffer without detergent. Each wash was performed using a dounce homogenizer and the cleaned inclusion bodies (IBs) were collected by centrifugation at 10,000 rpm (SS34 rotor) for 15 minutes. The purified IBs were washed a final time with 50 mM Tris-HCl, pH 8.0 and stored as a cell pellet at −80° C. until needed.

[0590] IB material was thawed and solubilized in 8 M urea at pH 4.0. This step selectively solubilized the target protein while leaving a significant amount of debris and contaminating proteins as a solid precipitate which was removed by centrifugation. Because of the single cysteine present in these proteins, all subsequent purification procedures were carried out using buffers containing 1 mM DTT as a reducing agent. Solubilized protein was captured using SP fast flow sepharose (30 ml, XK16) and selectively eluted with 8 M urea in 25 mM Na Acetate (C₂H3O₂Na), pH 4.0, 1 mM DTT, 1 mM EDTA and 0.2 M NaCl. To eliminate protein precipitation following this step, the pH of the SP elution was adjusted from 4.0 to 8.0 by dialysis against 50 mM Tris-HCl, pH 8.0, 1 mM DTT, 1 mM EDTA before protein refolding. The dialyzed material was refolded by direct dilution (10-fold) into 50 mM Tris-HCl pH 8.0, 1 mM DTT and 1 mM EDTA such that the final protein concentration was less than 0.1 mg/ml. The refolded SP pool was loaded directly onto Q high performance sepharose (30 ml, XK16) and bound protein was eluted with a 20 column volume linear gradient from 0 to 0.5 M NaCl in 50 mM Tris-HCl, pH 8.0, 1 mM DTT, 1 mM EDTA. This chromatography step yielded a single peak that eluted at a conductivity of approximately 15 ms/cm. The eluted material was pooled and stored at −80° C.

[0591] Protein characterization: Proteins were characterized for purity, identity, endotoxin content, and biological activity using the following assays.

[0592] SDS-PAGE: Proteins (typically 5 μg) were diluted in SDS-PAGE sample buffer (1% SDS, 30 mM Tris-HCl, pH 6.8, 4% glycerol, 0.1 mg/ml bromophenol blue) with and without 5 mM β-mercaptoethanol. The samples were boiled for 5 minutes and loaded onto a 4-20% SDS polyacrylamide gel. Following electrophoresis, gels were stained with coomassie blue to visualize protein bands.

[0593] Endotoxin assay: Endotoxin levels were measured using the QCL-1000 Quantitative Chromogenic LAL test kit (BioWhittaker #50-648U), following the manufacturer's instructions for the microplate method.

[0594] Protein Assay: Protein concentrations were determined by the MicroBCA Protein Assay Reagent Kit in a 96-well format using BSA as a standard (Pierce Biotechnology), following the manufacturer's instructions.

[0595] Flagellin ELISA: Protein integrity and concentration were examined by ELISA with antibodies specific for flagellin. 96-well ELISA plates were coated overnight at 4° C. with serial dilutions of each target protein, in PBS starting at 5 μg/ml. Plates were blocked with 200 μl/well of Assay Diluent Buffer (ADB; BD Pharmingen) for one hour at room temperature then washed three times in phosphate-buffered saline containing Tween-20 (PBS-T, 12 mM NaPO₄, 137 mM NaCl, 2.7 mM KCl, 0.05% Tween 20). Rabbit polyclonal anti-flagellin antibody diluted in ADB (100 μl/well, 1:5000) was added to all wells and the plates were incubated for 1 hour at room temperature or overnight at 4° C., then washed three times with PBS-T. HRP-labeled goat anti-rabbit IgG antibody (Jackson Immunochemical) diluted in ADB was added (100 μl/well, 1:5000) and the plates were incubated at room temperature for 1 hour. The plates were washed three times with PBS-T. After adding TMB Ultra substrate (Pierce) and monitoring color development, A₄₅₀ was measured on a Tecan Farcyte microplate spectrophotometer.

[0596] TLR5 bioactivity assay: HEK293 cells (ATCC, Cat#CRL-1573, Manassas, Va.) constitutively express TLR5, and secrete several soluble factors, including IL-8, in response to TLR5 signaling. Cells were seeded in 96 well microplates (50,000 cells/well), and recombinant test proteins were added. The next day, the conditioned medium was harvested, transferred to a clean 96-well microplate, and frozen at −20° C. After thawing, the conditioned medium was assayed for the presence of IL-8 in a sandwich ELISA using an anti-human IL-8 matched antibody pair (Pierce; Rockford, Ill., #M801E and #M802B) following the manufacturer's instructions. Optical density was measured using a microplate spectrophotometer

### Results and Discussion

[0597] Protein yield and purity: The final yield and endotoxin levels of each protein are shown below.

| Protein | SEQ ID NO: | Yield (mg) | Endotoxin (EU/μg) |
|---|---|---|---|
| STF2Δ.3′Cys | 332 | 75.0 | 0.01 |
| STF2Δ.HingeCys | 333 | 117.0 | 0.004 |

[0598] Flagellin integrity: Engineering a single cysteine into STF2Δ does not diminish its recognition by flagellin-specific antibodies, as shown in FIG. 22.

[0599] TLR5 agonist activity in the HEK293 IL-8 assay: Engineering a single cysteine into STF2Δ does not diminish the TLR agonist activity of the protein, as shown in FIG. 23. Cells exposed to STF2Δ.3′Cys (SEQ ID NO: 332) or STF2Δ.HingeCys (SEQ ID NO: 333) secreted IL-8 at levels comparable to those induced by exposure to full-length flagellin (STF2, SEQ ID NO: 312) or STF2Δ without cysteine residues (SEQ ID NO: 313).

[0600] Fusion of full-length flagellin (STF2, SEQ ID NO: 312) or hinge region-deleted flagellin (STF2Δ, SEQ ID NO: 313) to a protein antigen such as West Nile virus envelope protein or influenza A hemagglutination significantly increases the immunogenicity of the fused antigen. This approach is useful for protein or peptide antigens which can be encoded in a genetic fusion construct expressing both flagellin and the antigen of interest in a single protein, but it cannot be applied to non-protein or non-peptide antigens, such as polysaccharide antigens. Since many bacteria and tumor cells express specific polysaccharide structures that are antigenic but poorly immunogenic, it is important to devise scalable methods for increasing the immunogenicity and protective efficacy of such structures. Chemical conjugation to a TLR ligand, such as flagellin, is one potential strategy.

[0601] There are several methods of chemical linkage, but one of the simplest is to couple an antigen to a free thiol group such as that on a single, unmatched cysteine residue. Since flagellin does not natively contain any cysteines, cysteine residues were engineered into flagellin at one of three positions: the amino terminus of flagellin (5′Cys.STF2Δ, SEQ ID NO: 326 and SEQ ID NO: 334), the carboxy terminus of flagellin (STF2Δ.3′Cys, SEQ ID NO: 325 and SEQ ID NO: 332), and in the deleted hinge region of flagellin (STF2Δ.HingeCys, SEQ ID NO: 331 and SEQ ID NO: 333). All constructs were produced in the expression vector pET24a for E. coli expression. When purified from E. coli cells, STF2Δ.HingeCys (SEQ ID NO: 333) and STF2Δ.3′Cys (SEQ ID NO: 332) proteins retain all antigenic and TLR5 biological activity properties of the unmodified STF2Δ protein, thus confirming that the introduction of a single cysteine residue does not negatively impact the expression, purification, refolding, or biological activity of STF2Δ.

### Conjugation of Influenza hemagglutinin Maturational Cleavage site peptide to STF2Δ.hingeCYS

[0602] A peptide representing the maturational cleavage site of influenza hemagglutinin was chemically conjugated a modified flagellin protein, STF2Δ.HingeCys (SEQ ID NO: 333).

### Materials and Methods

[0603] Production of STF2Δ.HingeCys protein: STF2Δ.HingeCys protein (SEQ ID NO: 333) was expressed and purified as described in the previous Example.

[0604] Synthesis of H1C1 peptides The sequence NH₂-NIPSIQSRGLFFAIAGFIE-COOH (SEQ ID NO: 337) represents the maturational cleavage site of influenza A/H1N1 hemagglutinin (Bianchi, E., et al. (2005). Universal influenza B vaccine based on the maturational cleavage site of the hemagglutinin precursor (Bianchi, et al., J. Virol. 79:7380-7388 (2005)). Two peptides were designed with an extra cysteine or an extra lysine on the N-terminus to facilitate chemical linkage to carrier proteins, resulting in the following peptide sequences:

| | |
|---|---|
| CysH1C1 | (SEQ ID NO: 338) |
| NH₂-CNIPSIQSRGLFFAIAGFIE-COOH | (SEQ ID NO: 338) |
| LysH1C1 | (SEQ ID NO: 339) |
| NH₂-KNIPSIQSRGLFFAIAGFIE-COOH | (SEQ ID NO: 339) |

[0605] The peptides were synthesized by Anaspec, Inc., (San Jose, Calif.) utilizing standard Fmoc chemistry, after which they were cleaved from the matrix with trifluoroacetic acid (TFA), purified by reversed-phase HPLC and lyophilized.

[0606] Conjugation of CysH1C1 peptide to STF2Δ.HingeCys: STF2Δ.HingeCys protein (SEQ ID NO: 333) at a concentration of 4.9 mg/mL was dialyzed overnight into Buffer A [1× phosphate-buffered saline (PBS), 5 mM EDTA, pH 7.2]. BM(PEO)₂ (Pierce Biotechnology, Rockford, Ill.), a homobifunctional maleimide crosslinker, was dissolved in DMSO (dimethyl sulfoxide) and added to a final concentration of 2.3 mM. After incubating for 1 hour at room temperature, the free crosslinker was removed from the protein using a 5 ml Superdex 25 HiTrap desalting column. CysH1C1 peptide (SEQ ID NO: 338) was dissolved in DMSO and added to the maleimide-derivatized STF2Δ.HingeCys protein at a final concentration of 0.32 mM. After incubating 3 hours at room temperature, the reaction was stopped by adding DTT (dithiothreitol) to a final concentration of 40 mM. The protein and protein-peptide conjugate were separated from free peptide by fractionation on a Superdex 200 10/300 size-exclusion chromatography (SEC) column (GE/Amersham; Piscataway, N.J.) equilibrated in 1× Tris-buffered saline (TBS), pH 8.0.

[0607] Protein characterization: Proteins were characterized for purity, identity, endotoxin content, and biological activity as described in the previous Example.

### Results and Discussion

[0608] Characterization of the STF2Δ.HingeCys:CysH1C1 peptide conjugate: Conjugation of the CysH1C1 peptide (SEQ ID NO: 338) to STF2Δ.HingeCys (SEQ ID NO: 333) was assayed by SDS-PAGE with coomassie staining. Peptide conjugation to the protein resulted in a doublet band in which the faster-migrating band corresponded to the un-conjugated protein and the slower migrating band corresponded to the protein-peptide conjugate.

[0609] A cloudy precipitate was seen in the conjugation mixture due to the low solubility of the peptide. To ascertain if the protein-peptide conjugate was precipitating, the mixture was centrifuged (16,000×g for 15 minutes) and the resulting pellet and supernatant fractions analyzed by SDS-PAGE. The majority of the peptide-conjugated protein remains in the supernatant indicating that it is still soluble.

[0610] Size-exclusion chromatography (SEC) of the STF2Δ.HingeCys:CysH1C1 conjugate was performed to separate the conjugated protein from remaining crosslinker and unconjugated peptide. A single major protein peak eluted in the included range of the column at the expected volume for monomeric STF2Δ, while there is very little material eluting in the void (FIG. 24), indicating that most of the fractionating protein is monomeric.

[0611] The monomeric nature of the STF2Δ.HingeCys:CysH1C1 conjugate was confirmed by SDS-PAGE analysis of the S200 fractions (FIG. 25). The protein-peptide conjugate co-elutes with the unconjugated protein in the same ratio as in the load sample, indicating that the conjugate species is a monomer.

[0612] Bioactivity of the STF2Δ.HingeCys:CysH1C1 conjugate mixture was found to be equivalent to the unconjugated STF2Δ.HingeCys protein, indicating that the attachment of the BM(PEO)₂ crosslinker and the peptide conjugation reaction does not inhibit TLR5 stimulatory activity (FIG. 8).

### Conjugation of a PAM₃CYS-Containing Lipopeptide to an Influenza Hemagglutinin Antigen

[0613] Several types of Toll-like Receptors (TLRs) are potently activated by lipids or lipid-conjugates. These include TLR2/1 (diacyl lipoproteins and GPI-linked proteins), TLR2/6 (triacyl lipoproteins and GPI-linked proteins) and TLR4 (lipopolysaccharides). The utility of vaccines composed of antigens liked to such lipids is obvious: the lipids are strong activators of innate immune pathways and yet are themselves poorly immunogenic. However, the production of such conjugates is very complex. Biosynthesis of recombinant lipoproteins in bacteria is limited by low productivity and extreme difficulty in purifying the resulting protein-lipopeptide fusion. Chemical synthesis of lipopeptide antigens is more straight forward, but is limited to peptide antigens. Here we demonstrate the chemical conjugation of a Pam₃Cys lipopeptide, a TLR2/6 agonist, to influenza HA1-1His₆ in a process which bypasses the difficulties inherent in both biosynthesis and complete chemical synthesis of lipidated antigens.

### Materials and Methods

[0614] Production of HA1-1His₆(PR8)Bv (SEQ ID NO: 179) HA1-1His₆ (PR8)Bv was prepared as described herein.

[0615] Synthesis of Pam₃CS(K)₄GC (SEQ ID NO: 335) Custom lipopeptide synthesis was performed by Anaspec, Inc. (San Jose, Calif.) using standard solid-phase Fmoc chemistry, after which the lipopeptide was cleaved from the matrix with trifluoroacetic acid (TFA), purified by reversed-phase HPLC and lyophilized.

[0616] Conjugation of Pam₃CS(K)₄GC (SEQ ID NO:335) to HA1-1His₆(PR8)Bv (SEQ ID NO: 179) HA1-1His₆(PR8)Bv (SEQ ID NO: 179) was dialyzed into Buffer A (1×PBS+5 mM EDTA, pH 7.2). Sulfo-SMCC (Pierce; Rockland, Ill.) a heterobifunctional maleimide/NHS-ester crosslinker was dissolved in DMSO and added to a final concentration of 0.432 mM. After incubating for 30 min. at room temperature the protein was desalted into Buffer A using a G-25 HiTrap desalting column (GE/Amersham; Piscataway, N.J.). Triton X-114 (TX-114) (Sigma; St Louis, Mo.) was added to a final concentration of 1% (w/v). Pam₃CS(K)₄GC was dissolved to 20 mg/ml in DMSO and added to a final concentration of 0.6 mg/ml. After incubating at room temperature for 3 hours, the reaction tube was placed in a 37° C. bath for 10 minutes to cause TX-114 droplet formation. The sample was then centrifuged at 16,000×g for 10 minutes to separate the detergent and aqueous phases. After drawing off the aqueous phase the detergent phase was resuspended to the original reaction volume with Buffer A. The total, detergent, and aqueous samples were then analyzed by SDS-PAGE.

[0617] Protein characterization: Proteins-lipopeptide conjugates were characterized by SDS-PAGE. Samples (typically 5 μg) were diluted in SDS-PAGE sample buffer (0.1M Tris, pH 8.0/4% SDS/25% glycerol/0.1M DTT). The samples were boiled for 5 minutes and loaded onto a 10% SDS polyacrylamide gel. Following electrophoresis, gels were stained with coomassie blue to visualize protein bands.

### Results and Discussion

[0618] Input HA1-1His₆(PR8)Bv (SEQ ID NO: 179) runs as a doublet band on SDS-PAGE. This has been seen for all of the HA1-1His₆ proteins made in Baculovirus to date and is likely due to differences in glycosylation. HA1-1His₆(PR8)Bv (SEQ ID NO: 179) which has been derivatized with Sulfo-SMCC but not conjugated to lipopeptide stays in the aqueous phase during TX-114 separation, the expected behavior for a soluble, globular protein. HA1-1His₆(PR8)Bv (SEQ ID NO: 179) conjugated to Pam₃Cys shows 3 or 4 bands of higher molecular weight than the derivatized input protein, consistent with covalent modification by the lipopeptide. On TX-114 phase separation the higher mw species segregate primarily into the detergent phase while the lower species (corresponding to the unmodified protein) stay in the aqueous phase. This behavior is consistent with the commonly observed segregation of lipoproteins into detergent droplets and confirms that HA1-1His₆(PR8)Bv (SEQ ID NO: 179) has been covalently modified with the Pam₃CS(K)₄GC (SEQ ID NO: 335) lipopeptide. The higher molecular-weight bands of approximately 60, 120, and 180 kDa, which are seen in the SMCC-derivatized protein but not in the input, are covalent HA1-1 multimers formed by the crosslinker. This multimerization would be prevented, and the yield of singly lipidated HA1-1 improved, by engineering a single cysteine into HA1-1 and using a cysteine-specific rather than a lysine-specific crosslinker. Such a strategy would also give better control over the site of attachment of the lipopeptide on HA1-1, giving a more homogeneous product and possibly improving immunogenicity

SEQ ID NO: 312, amino acid sequence of STF2
MAQVINTNSLSLLTQNNLNKSQSALGTAIERLSSGLRINSAKDDAAGQAI
ANRFTANIKGLTQASRNANDGISIAQTTEGALNEINNNLQRVRELAVQSA
NSTNSQSDLDSIQAEITQRLNEIDRVSGQTQFNGVKVLAQDNTLTIQVGA
NDGETIDIDLKQINSQTLGLDSLNVQKAYDVKDTAVTTKAYANNGTTLDV
SGLDDAAIKAATGGTNGTASVTGGAVKFDADNNKYFVTIGGFTGADAAKN
GDYEVNVATDGTVTLAAGATKTTMPAGATTKTEVQELKDTPAVVSADAKN
ALIAGGVDATDANGAELVKMSYTDKNGKTIEGGYALKAGDKYYAADYDEA
TGAIKAKTTSYTAADGTTKTAANQLGGVDGKTEVVTIDGKTYNASKAAGH
DFKAQPELAEAAAKTTENPLQKIDAALAQVDALRSDLGAVQNRFNSAITN
LGNTVNNLSEARSRIEDSDYATEVSNMSRAQILQQAGTSVLAQANQVPQN
VLSLLR
SEQ ID NO: 313, amino acid sequence of STF2Δ
MAQVINTNSLSLLTQNNLNKSQSALGTAIERLSSGLRINSAKDDAAGQAI
ANRFTANIKGLTQASRNANDGISIAQTTEGALNEINNNLQRVRELAVQSA
NSTNSQSDLDSIQAEITQRLNEIDRVSGQTQFNGVKVLAQDNTLTIQVGA
NDGETIDIDLKQINSQTLGLDSLNVHGAPVDPASPWTENPLQKIDAALAQ
VDALRSDLGAVQNRFNSAITNLGNTVNNLSEARSRIEDSDYATEVSNMSR
AQILQQAGTSVLAQANQVPQNVLSLLR
SEQ ID NO: 314, nucleotide sequence of STF2Δ
ATGGCACAAGTAATCAACACTAACAGTCTGTCGCTGCTGACCCAGAATAA
CCTGAACAAATCCCAGTCCGCACTGGGCACCGCTATCGAGCGTCTGTCTT
CTGGTCTGCGTATCAACAGCGCGAAAGACGATGCGGCAGGTCAGGCGATT
GCTAACCGTTTCACCGCGAACATCAAAGGTCTGACTCAGGCTTCCCGTAA
CGCTAACGACGGTATCTCCATTGCGCAGACCACTGAAGGCGCGCTGAACG
AAATCAACAACAACCTGCAGCGTGTGCGTGAACTGGCGGTTCAGTCTGCT
AACAGCACCAACTCCCAGTCTGACCTCGACTCCATCCAGGCTGAAATCAC
CCAGCGCCTGAACGAAATCGACCGTGTATCCGGCCAGACTCAGTTCAACG
GCGTGAAAGTCCTGGCGCAGGACAACACCCTGACCATCCAGGTTGGCGCC
AACGACGGTGAAACTATCGATATCGATCTGAAGCAGATCAACTCTCAGAC
CCTGGGTCTGGACTCACTGAACGTGCATGGAGCGCCGGTGGATCCTGCTA
GCCCATGGACCGAAAACCCGCTGCAGAAAATTGATGCCGCGCTGGCGCAG
GTGGATGCGCTGCGCTCTGATCTGGGTGCGGTACAAAACCGTTTCAACTC
TGCTATCACCAACCTGGGCAATACCGTAAACAATCTGTCTGAAGCGCGTA
GCCGTATCGAAGATTCCGACTACGCGACCGAAGTTTCCAACATGTCTCGC
GCGCAGATTTTGCAGCAGGCCGGTACTTCCGTTCTGGCGCAGGCTAACCA
GGTCCCGCAGAACGTGCTGTCTCTGTTACGT
SEQ ID NO: 315, nucleotide sequence of STF2
ATGGCACAAGTAATCAACACTAACAGTCTGTCGCTGCTGACCCAGAATAA
CCTGAACAAATCCCAGTCCGCACTGGGCACCGCTATCGAGCGTCTGTCTT
CTGGTCTGCGTATCAACAGCGCGAAAGACGATGCGGCAGGTCAGGCGATT
GCTAACCGTTTCACCGCGAACATCAAAGGTCTGACTCAGGCTTCCCGTAA
CGCTAACGACGGTATCTCCATTGCGCAGACCACTGAAGGCGCGCTGAACG
AAATCAACAACAACCTGCAGCGTGTGCGTGAACTGGCGGTTCAGTCTGCT
AACAGCACCAACTCCCAGTCTGACCTCGACTCCATCCAGGCTGAAATCAC
CCAGCGCCTGAACGAAATCGACCGTGTATCCGGCCAGACTCAGTTCAACG
GCGTGAAAGTCCTGGCGCAGGACAACACCCTGACCATCCAGGTTGGCGCC
AACGACGGTGAAACTATCGATATCGATCTGAAGCAGATCAACTCTCAGAC
CCTGGGTCTGGACTCACTGAACGTGCAGAAAGCGTATGATGTGAAAGATA
CAGCAGTAACAACGAAAGCTTATGCCAATAATGGTACTACACTGGATGTA
TCGGGTCTTGATGATGCAGCTATTAAAGCGGCTACGGGTGGTACGAATGG
TACGGCTTCTGTAACCGGTGGTGCGGTTAAATTTGACGCAGATAATAACA
AGTACTTTGTTACTATTGGTGGCTTTACTGGTGCTGATGCCGCCAAAAAT
GGCGATTATGAAGTTAACGTTGCTACTGACGGTACAGTAACCCTTGCGGC
TGGCGCAACTAAAACCACAATGCCTGCTGGTGCGACAACTAAAACAGAAG
TACAGGAGTTAAAAGATACACCGGCAGTTGTTTCAGCAGATGCTAAAAAT
GCCTTAATTGCTGGCGGCGTTGACGCTACCGATGCTAATGGCGCTGAGTT
GGTCAAAATGTCTTATACCGATAAAAATGGTAAGACAATTGAAGGCGGTT
ATGCGCTTAAAGCTGGCGATAAGTATTACGCCGCAGATTACGATGAAGCG
ACAGGAGCAATTAAAGCTAAAACTACAAGTTATACTGCTGCTGACGGCAC
TACCAAAACAGCGGCTAACCAACTGGGTGGCGTAGACGGTAAAACCGAAG
TCGTTACTATCGACGGTAAAACCTACAATGCCAGCAAAGCCGCTGGTCAT
GATTTCAAAGCACAACCAGAGCTGGCGGAAGCAGCCGCTAAAACCACCGA
AAACCCGCTGCAGAAAATTGATGCCGCGCTGGCGCAGGTGGATGCGCTGC
GCTCTGATCTGGGTGCGGTACAAAACCGTTTCAACTCTGCTATCACCAAC
CTGGGCAATACCGTAAACAATCTGTCTGAAGCGCGTAGCCGTATCGAAGA
TTCCGACTACGCGACCGAAGTTTCCAACATGTCTCGCGCGCAGATTCTGC
AGCAGGCCGGTACTTCCGTTCTGGCGCAGGCTAACCAGGTCCCGCAGAAC
GTGCTGTCTCTGTTACGT
SEQ ID NO: 316, nucleotide sequence of STF2.OVA
ATGGCACAAGTAATCAACACTAACAGTCTGTCGCTGCTGACCCAGAATAA
CCTGAACAAATCCCAGTCCGCACTGGGCACCGCTATCGAGCGTCTGTCTT
CTGGTCTGCGTATCAACAGCGCGAAAGACGATGCGGCAGGTCAGGCGATT
GCTAACCGTTTCACCGCGAACATCAAAGGTCTGACTCAGGCTTCCCGTAA
CGCTAACGACGGTATCTCCATTGCGCAGACCACTGAAGGCGCGCTGAACG
AAATCAACAACAACCTGCAGCGTGTGCGTGAACTGGCGGTTCAGTCTGCT
AACAGCACCAACTCCCAGTCTGACCTCGACTCCATCCAGGCTGAAATCAC
CCAGCGCCTGAACGAAATCGACCGTGTATCCGGCCAGACTCAGTTCAACG
GCGTGAAAGTCCTGGCGCAGGACAACACCCTGACCATCCAGGTTGGCGCC
AACGACGGTGAAACTATCGATATCGATCTGAAGCAGATCAACTCTCAGAC
CCTGGGTCTGGACTCACTGAACGTGCAGAAAGCGTATGATGTGAAAGATA
CAGCAGTAACAACGAAAGCTTATGCCAATAATGGTACTACACTGGATGTA
TCGGGTCTTGATGATGCAGCTATTAAAGCGGCTACGGGTGGTACGAATGG
TACGGCTTCTGTAACCGGTGGTGCGGTTAATTTGACGCAGATAATAACAA
GTACTTTGTTACTATTGGTGGCTTTACTGGTGCTGATGCCGCCAAAAATG
GCGATTATGAAGTTAACGTTGCTACTGACGGTACAGTAACCCTTGCGGCT
GGCGCAACTAAAACCACAATGCCTGCTGGTGCGACAACTAAAACAGAAGT
ACAGGAGTTAAAAGATACACCGGCAGTTGTTTCAGCAGATGCTAAAAATG
CCTTAATTGCTGGCGGCGTTGACGCTACCGATGCTAATGGCGCTGAGTTG
GTCAAAATGTCTTATACCGATAAAATGGTAAGACAATTGAAGGCGGTTAT
GCGCTTAAAGCTGGCGATAAGTATTACGCCGCAGATTACGATGAAGCGAC
AGGAGCAATTAAAGCTAAAACCACAAGTTATACTGCTGCTGACGGCACTA
CCAAAACAGCGGCTAACCAACTGGGTGGCGTAGACGGTAAAACCGAAGTC
GTTACTATCGACGGTAAAACCTACAATGCCAGCAAAGCCGCTGGTCATGA
TTTCAAAGCACAACCAGAGCTGGCGGAAGCAGCCGCTAAAACCACCGAAA
ACCCGCTGCAGAAAATTGATGCCGCGCTGGCGCAGGTGGATGCGCTGCGC
TCTGATCTGGGTGCGGTACAAAACCGTTTCAACTCTGCTATCACCAACCT
GGGCAATACCGTAAACAATCTGTCTGAAGCGCGTAGCCGTATCGAAGATT
CCGACTACGCGACCGAAGTTTCCAACATGTCTCGCGCGCAGATTTTGCAG
CAGGCCGGTACTTCCGTTCTGGCGCAGGCTAACCAGGTCCCGCAGAACGT
GCTGTCTCTGTTACGTCTCGAGGGCTCCATCGGCGCAGCAAGCATGGAAT
TTTGTTTTGATGTATTCAAGGAGCTCAAAGTCCACCATGCCAATGAGAAC
ATCTTCTACTGCCCCATTGCCATCATGTCAGCTCTAGCCATGGTATACCT
GGGTGCAAAAGACAGCACCAGGACACAAATAAATAAGGTTGTTCGCTTTG
ATAAACTTCCAGGATTCGGAGACAGTATTGAAGCTCAGTGTGGCACATCT
GTAAACGTTCACTCTTCACTTAGAGACATCCTCAACCAAATCACCAAACC
AAATGATGTTTATTCGTTCAGCCTTGCCAGTAGACTTTATGCTGAAGAGA
GATACCCAATCCTGCCAGAATACTTGCAGTGTGTGAAGGAACTGTATAGA
GGAGGCTTGGAACCTATCAACTTTCAAACAGCTGCAGATCAAGCCAGAGA
GCTCATCAATTCCTGGGTAGAAAGTCAGACAATGGAATTATCAGAATGTC
CTTCAGCCAAGCTCCGTGGATTCTCAAACTGCAATGGTTCTGGTTAATGC
CATTGTCTTCAAAGGACTGTGGGAGAAAGCATTTAAGGATGAAGACACAC
AAGCAATGCCTTTCAGAGTGACTGAGCAAGAAAGCAAACCTGTGCAGATG
ATGTACCAGATTGGTTTATTTAGAGTGGCATCAATGGCTTCTGAGAAAAT
GAAGATCCTGGAGCTTCCATTTGCCAGTGGGACAATGAGCATGTTGGTGC
TGTTGCCTGATGAAGTCTCAGGCCTTGAGCAGCTTGAGAGTATAATCAAC
TTTGAAAAACTGACTGAATGGACCAGTTCTAATGTTATGGAAGAGAGGAA
GATCAAAGTGTACTTACCTCGCATGAAGATGGAGGAAAAATACAACCTCA
CATCTGTCTTAATGGCTATGGGCATTACTGACGTGTTTAGCTCTTCAGCC
AATCTGTCTGGCATCTCCTCAGCAGAGAGCCTGAAGATATCTCAAGCTGT
CCATGCAGCACATGCAGAAATCAATGAAGCAGGCAGAGAGGTGGTAGGGT
CAGCAGAGGCTGGAGTGGATGCTGCAAGCGTCTCTGAAGAATTTAGGGCT
GACCATCCATTCCTCTTCTGTATCAAGCACATCGCAACCAACGCCGTTCT
CTTCTTTGGCAGATGTGTTTCCCCTTCGAAGCTTGAAGGTAAGCCTATCC
CTAACCCTCTCCTCGGTCTCGATTCTACGCGTACCGGTCATCATCACCAT
CACCATTGA
SEQ ID NO: 317, nucleotide sequence of STF28BGF-1
CTCGGGAGATCTGCACAAGTAATCAACACTAACAGTCT
SEQ ID NO: 318, nucleotide sequence of STF28MCR-1
CCATGGGCTAGCAGGATCCACCGGCGCTCCCTGCACGTTCA
SEQ ID NO: 319, nucleotide sequence of STF28MCF-2
GGAGCGCCGGTGGATCCTGCTAGCCCATGGACCGAAAACCCG
SEQ ID NO: 320, nucleotide sequence of STF28ECR-2
TCTGCAGAATTCACGTAACAGAGACAGCACGTTCTGCGGGACGTCCCGCA
GAACGTGCTGTCTCTGTTACGTGAATTCTGCAGA
SEQ ID NO: 312, nucleotide sequence of 3′Forward1
ACTGAGTGCATATGGCACAAGTAATCAACACTAACAG
SEQ ID NO: 322, nucleotide sequence of 3′Reverse1
GACTGACTGCTCAGCCTATTAGCAGAGCGGCCGCCACTGTGCTGGATATC
TAGAG
SEQ ID NO: 323 nucleotide sequence of 5′Forward2
AGTCAGGCCATATGTGCGCACAAGTAATCAACACTAACAGTCTG
SEQ ID NO: 324, nucleotide sequence of 5′Reverse2
GACTGACTGCTCAGCCTATTAACGTAACAGAGACAGCACGTTCTGCGGGA
CCTGGTTAG
SEQ ID NO: 325, nucleotide sequence of STF2Δ.3′Cys
ATGGCACAAGTAATCAACACTAACAGTCTGTCGCTGCTGACCCAGAATAA
CCTGAACAAATCCCAGTCCGCACTGGGCACCGCTATCGAGCGTCTGTCTT
CTGGTCTGCGTATCAACAGCGCGAAAGACGATGCGGCAGGTCAGGCGATT
GCTAACCGTTTCACCGCGAACATCAAAGGTCTGACTCAGGCTTCCCGTAA
CGCTAACGACGGTATCTCCATTGCGCAGACCACTGAAGGCGCGCTGAACG
AAATCAACAACAACCTGCAGCGTGTGCGTGAACTGGCGGTTCAGTCTGCT
AACAGCACCAACTCCCAGTCTGACCTCGACTCCATCCAGGCTGAAATCAC
CCAGCGCCTGAACGAAATCGACCGTGTATCCGGCCAGACTCAGTTCAACG
GCGTGAAAGTCCTGGCGCAGGACAACACCCTGACCATCCAGGTTGGCGCC
AACGACGGTGAAACTATCGATATCGATCTGAAGCAGATCAACTCTCAGAC
CCTGGGTCTGGACTCACTGAACGTGCATGGAGCGCCGGTGGATCCTGCTA
GCCCATGGACCGAAAACCCGCTGCAGAAAATTGATGCCGCGCTGGCGCAG
GTGGATGCGCTGCGCTCTGATCTGGGTGCGGTACAAAACCGTTTCAACTC
TGCTATCACCAACCTGGGCAATACCGTAAACAATCTGTCTGAAGCGCGTA
GCCGTATCGAAGATTCCGACTACGCGACCGAAGTTTCCAACATGTCTCGC
GCGCAGATTTTGCAGCAGGCCGGTACTTCCGTTCTGGCGCAGGCTAACCA
GGTCCCGCAGAACGTGCTGTCTCTGTTACGTGAATTCTCTAGATATCCAG
CACAGTGGCGGCCGCTCTGC
SEQ ID NO: 326, nucleotide sequence of 5′Cys.STF2Δ
ATGTGCGCACAAGTAATCAACACTAACAGTCTGTCGCTGCTGACCCAGAA
TAACCTGAACAAATCCCAGTCCGCACTGGGCACCGCTATCGAGCGTCTGT
CTTCTGGTCTGCGTATCAACAGCGCGAAGACGATGCGGCAGGTCAGGCGA
TTGCTAACCGTTTCACCGCGAACATCAAAGGTCTGACTCAGGCTTCCCGT
AACGCTAACGACGGTATCTCCATTGCGCAGACCACTGAAGGCGCGCTGAA
CGAAATCAACAACAACCTGCAGCGTGTGCGTGAACTGGCGGTTCAGTCTG
CTAACAGCACCAACTCCCAGTCTGACCTCGACTCCATCCAGGCTGAAATC
ACCCAGCGCCTGAACGAAATCGACCGTGTATCCGGCCAGACTCAGTTCAA
CGGCGTGAAAGTCCTGGCGCAGGACAACACCCTGACCATCCAGGTTGGCG
CCAACGACGGTGAAACTATCGATATCGATCTGAAGCAGATCAACTCTCAG
ACCCTGGGTCTGGACTCACTGAACGTGCATGGAGCGCCGGTGGATCCTGC
TAGCCCATGGACCGAAAACCCGCTGCAGAAAATTGATGCCGCGCTGGCGC
AGGTGGATGCGCTGCGCTCTGATCTGGGTGCGGTACAAAACCGTTTCAAC
TCTGCTATCACCAACCTGGGCAATACCGTAAACAATCTGTCTGAAGCGCG
TAGCCGTATCGAAGATTCCGACTACGCGACCGAAGTTTCCAACATGTCTC
GCGCGCAGATTTTGCAGCAGGCCGGTACTTCCGTTCTGGCGCAGGCTAAC
CAGGTCCCGCAGAACGTGCTOTCTCTGTTACGT
SEQ ID NO: 327, nucleotide sequence of
HingeForward1
ACTGAGTGCATATGGCACAAGTAATCAACACTAACAG
SEQ ID NO: 328, nucleotide sequence of
HingeReverse3
GGTCCATGGGCAAGCAGGATCCACCGGCGCT
SEQ ID NO: 329, nucleotide sequence of
HingeForward2
AGCGCCGGTGGATCCTGCTTGCCCATGGACC
SEQ ID NO: 330, nucleotide sequence of
HingeReverse4
GACTGACTGCTCAGCCTATTAACGTAACAGAGACAGCACGTTCTGCGGGA
CCTGGTTAG
SEQ ID NO: 331, nucleotide sequence of
STF2Δ.HingeCys
ATGGCACAAGTAATCAACACTAACAGTCTGTCGCTGCTGACCCAGAATAA
CCTGAACAAATCCCAGTCCGCACTGGGCACCGCTATCGAGCGTCTGTCTT
CTGGTCTGCGTATCAACAGCGCGAAGACGATGCGGCAGGTCAGGCGATTG
CTAACCGTTTCACCGCGAACATCAAAGGTCTGACTCAGGCTTCCCGTAAC
GCTAACGACGGTATCTCCATTGCGCAGACCACTGAAGGCGCGCTGAACGA
AATCAACAACAACCTGCAGCGTGTGCGTGAACTGGCGGTTCAGTCTGCTA
ACAGCACCAACTCCCAGTCTGACCTCGACTCCATCCAGGCTGAAATCACC
CAGCGCCTGAACGAAATCGACCGTGTATCCGGCCAGACTCAGTTCAACGG
CGTGAAAGTCCTGGCGCAGGACAACACCCTGACCATCCAGGTTGGCGCCA
ACGACGGTGAAACTATCGATATCGATCTGAAGCAGATCAACTCTCAGACC
CTGGGTCTGGACTCACTGAACGTGCATGGAGCGCCGGTGGATCCTGCTTG
CCCATGGACCGAAAACCCGCTGCAGAAAATTGATGCCGCGCTGGCGCAGG
TGGATGCGCTGCGCTCTGATCTGGGTGCGGTACAAAACCGTTTCAACTCT
GCTATCACCAACCTGGGCAATACCGTAAACAATCTGTCTGAAGCGCGTAG
CCGTATCGAAGATTCCGACTACGCGACCGAAGTTTCCAACATGTCTCGCG
CGCAGATTTTGCAGCAGGCCGGTACTTCCGTTCTGGCGCAGGCTAACCAG
GTCCCGCAGAACGTGCTGTCTCTGTTACGT
SEQ ID NO: 332, amino acid sequence of STF2Δ.3′Cys
MAQVINTNSLSLLTQNNLNKSQSALGTAIERLSSGLRINSAKDDAAGQAI
ANRFTANIKGLTQASRNANDGISIAQTTEGALNEINNNLQRVRELAVQSA
NSTNSQSDLDSIQAEITQRLNEIDRVSGQTQFNGVKVLAQDNTLTIQVGA
NDGETIDIDLKQINSQTLGLDSLNVHGAPVDPASPWTENPLQKIDAALAQ
VDALRSDLGAVQNRFNSAITNLGNTVNNLSEARSRIEDSDYATEVSNMSR
AQILQQAGTSVLAQANQVPQNVLSLLREFSRYPAQWRPL [symbol]
SEQ ID NO: 333, amino acid sequence of
STF2Δ.HingeCys
MAQVINTNSLSLLTQNNLNKSQSALGTAIERLSSGLRINSAKDDAAGQAI
ANRFTANIKGLTQASRNANDGISIAQTTEGALNEINNNLQRVRELAVQSA
NSTNSQSDLDSIQAEITQRLNEIDRVSGQTQFNGVKVLAQDNTLTIQVGA
NDGETIDIDLKQINSQTLGLDSLNVHGAPVDPAPWTENPLQKIDAALAQ
VDALRSDLGAVQNRFNSAITNLGNTVNNLSEARSRIEDSDYATEVSNMSR
AQILQQAGTSVLAQANQVPQNVLSLLR
SEQ ID NO: 334, amino acid sequence of 5′Cys.STF2Δ
M [symbol] AQVINTNSLSLLTQNNLNKSQSALGTAIERLSSGLRINSAKDDAAGQA
IANRFTANIKGLTQASRNANDGISIAQTTEGALNEINNNLQRVRELAVQS
ANSTNSQSDLDSIQAEITQRLNEIDRVSGQTQFNGVKVLAQDNTLTIQVG
ANDGETIDIDLKQINSQTLGLDSLNVHGAPVDPASPWTENPLQKIDAALA
QVDALRSDLGAVQNRFNSAITNLGNTVNNLSEARSRIEDSDYATEVSNMS
RAQILQQAGTSVLAQANQVPQNVLSLLR
SEQ ID NO: 335,
CSKKKKGC
SEQ ID NO: 336,
GAPVDPASPW

### Example 14 Cloning and Expression of STF2.4×H1C1, a Fusion Protein Comprising Flagellin (TLR5 Agonist) and the Maturational Cleavage Site Peptide of Influenza A Hemagglutinin

### Materials and Methods

[0619] Construct design: To facilitate cloning of target genes in fusion with flagellin, a cassette plasmid containing a unique BlpI site at the 3′ end of the flagellin gene was used (STF2.blp, SEQ ID NO: 340). This cassette was made by introducing a silent mutation (5′-GTGCTGAGCCTGTTACGT-3′) at nucleotides 1501 to 1518 of STF2, creating the unique BlpI site in the plasmid cassette, pET24/STF2.blp (SEQ ID NO: 340). Synthetic genes encoding one, two, three and four copies of the maturational cleavage site fragment (H1C1) of influenza A subtype H1 (NIPSIQSRGLFGAIAGFIE; SEQ ID NO: 341) were codon-optimized for E. coli expression and obtained from a commercial vendor (DNA2.0 Inc., Menlo Park, Calif.). The synthetic genes were excised with BlpI enzyme and ligated by compatible ends to pET24/STF2.blp which had been treated with BlpI and bacterial alkaline phosphatase (BAP). These constructs were designated as STF2.1×H1C1, STF2.2×H1C1, STF2.3×H1C1 and STF2.4×H1C1 respectively (SEQ ID NO: 342; SEQ ID NO: 343; SEQ ID NO: 344; SEQ ID NO: 345).

[0620] Similarly, a fusion gene constructed to contain the H1C1 sequence and flanked by a pair of cysteines to facilitate loop formation of the concatemers was designated as STF2.4×H1C2 (SEQ ID NO: 346). A similar approach was employed to generate a construct harboring four tandem copies of the cleavage fragment of influenza A subtype H5 (RERRRKKRGLFGAIAGFIE; SEQ ID NO: 347) designated as construct STF2.4×H5C1 (SEQ ID NO: 348). The consensus cleavage fragments representing subtypes H3 (NVPEKQTRGIFGAIAGFIE; SEQ ID NO: 349), H2 (NVPQIESRGLFGAIAGFIE; SEQ ID NO: 350) and the B-strain, B/HA (PAKLLKERGFFGAIAGFLE; SEQ ID NO: 351) are thus amenable to this experimental approach as outlined above. In each case, the constructed plasmids were used to transform competent E. coli TOP10 cells and putative recombinants were identified by PCR screening and restriction mapping analysis.

[0621] The integrity of the constructs was verified by DNA sequencing and they were used to transform the expression host, BLR3 (DE3) (Novagen, San Diego, Calif.; Cat #69053). Transformants were selected on plates containing kanamycin (50 μg/mL), tetracycline (5 μg/mL) and glucose (0.5%). Colonies were picked and inoculated into 2 ml of LB medium supplemented with 25 μg/ml kanamycin, 12.5 μg/ml tetracycline and 0.5% glucose and grown overnight. Aliquots of these cultures were used to inoculate fresh cultures in the same medium formulation, which were cultured until they reached an OD₆₀₀=0.6, at which time protein expression was induced by the addition of 1 mM IPTG and culturing for 3 hours at 37° C. The cells were harvested and analyzed for protein expression.

[0622] SDS-PAGE and Western blot: Protein expression and identity were determined by gel electrophoresis and immunoblot analysis. Cells were harvested by centrifugation and lysed in Laemmli buffer. An aliquot of 10 μl of each lysate was diluted in SDS-PAGE sample buffer with or without 100 mM DTT as a reductant. The samples were boiled for 5 minutes and loaded onto a 10% SDS polyacrylamide gel and electrophoresed (SDS-PAGE). The gel was stained with Coomassie R-250 (Bio-Rad; Hercules, Calif.) to visualize protein bands. For western blot, 0.5 μl/lane cell lysate was electrophoresed and electrotransfered to a PVDF membrane and blocked with 5% (w/v) dry milk. The membrane was probed with anti-flagellin antibody 6H11 (Inotek; Beverly, Mass.) After probing with alkaline phosophatase-conjugated secondary antibodies (Pierce; Rockland, Ill.), protein bands were visualized with an alkaline phosphatase chromogenic substrate (Promega, Madison, Wis.). Bacterial clones which yielded protein bands of the correct molecular weight and reactive with the appropriate antibodies were selected for production of protein for use in biological assays.

### Results and Discussion

[0623] Cloning and expression of cleavage site constructs: The maturational cleavage site fragment of hemagglutinin precursor is well-conserved across subtypes of influenza strains A and B, and could therefore be a target for the development of a universal vaccine effective against most circulating strains of influenza. A series of plasmids encoding a fusion of the TLR5 ligand with cleavage fragment was generated and expressed in E. coli strain BLR(DE3). As assayed by Coomassie blue staining of the SDS-PAGE gel and confirmed by immunoblot assays, the E. coli strains harboring the constructs STF2.1×H1C1, STF2.2×H1C1, STF2.3×H1C1, and STF2.4×H1C1 displayed bands that correspond to the predicted molecular weights of 55, 58, 60 and 62 kDa respectively. Similarly, BLR(DE3) strains expressing the constructs STF2.4×H1C2 and STF2.4×H5C1 display recombinant fusion proteins migrating with the apparent molecular weight of 62 Kda and 66 Kda respectively. These data indicate that a fusion of flagellin and cleavage fragment of HA is abundantly expressed in E coli.

### Expression and Purification of STF2.4×H1C1, a Fusion Protein Comprising Flagellin (TLR5 Agonist) and the Maturational Cleavage Site Peptide of Influenza A Hemagglutinin

### Materials and methods

[0624] Bacterial cell growth and cell lysis: The STF2.4×H1C1 (SEQ ID NO: 345) construct was expressed in the E. coli host strain BLR(DE3). The strain was retrieved from a glycerol stock and grown in shake flasks to a final volume of 12 L. Cells were grown in LB medium containing 50 μg/ml kanamycin, 12.5 μg/ml tetracycline, 0.5% dextrose to OD₆₀₀=0.6 and induced with 1 mM IPTG for 3 h at 37° C. The cells were harvested by centrifugation (7000 rpm×7 minutes in a Sorvall RC5C centrifuge) and resuspended in 20 mM Tris-HCl, pH 8.0, 1 μg/ml DNAseI, 1 mM PMSF, protease inhibitor cocktail and 1 mg/ml lysozyme. The cells were then lysed by two passes through a microfluidizer (Microfluidics; Newton, Mass.) at 15,000 psi. The lysate was centrifuged at 45,000 g for one hour in a Beckman Optima L ultracentrifuge (Beckman Coulter; Fullerton, Calif.) to separate the soluble and insoluble fractions.

[0625] Purification of STF2.4×H1C1 (SEQ ID NO: 345): After centrifugation, the supernatant fraction was collected and passed through a Q sepharose Fast Flow column (GE/Amersham Biosciences; Piscataway, N.J.). The flow-through fraction from this step was supplemented with Triton X-100 (Sigma; St. Louis, Mo.) to a final concentration of 1% (w/v) and passed through the same Q sepharose column. The flow through fraction was collected again and supplemented with urea to a final concentration of 8 M and citric acid to a final concentration of 20 mM. After adjusting the pH to 3.5 with concentrated HCl, the solution was passed over a Source S column (GE/Amersham Biosciences; Piscataway, N.J.) equilibrated with 20 mM citric acid, pH 3.5.

[0626] The column was then washed with 10 column volumes of equilibration buffer supplemented with 1% (w/v) Triton X-100 to remove endotoxin. The protein was then eluted in a 5-column volume linear gradient of 0 to 1 M NaCl in equilibration buffer. The STF2.4×H1C1 was then re-folded by rapid dilution to a final concentration of 0.1 mg/ml protein in refolding buffer [0.1 M Tris-HCl, pH 8.0, 0.1 M NaC, 1% (w/v) glycerol]. The refolded protein was concentrated using a pressurized ultrafiltration stir-cell (Millipore; Billerica, Mass.) and fractionated on a Superdex 200 size-exclusion column (GE/Amersham Biosciences; Piscataway, N.J.).

[0627] SDS-PAGE and Western Blot analysis: Protein identity was determined, and purity estimated, by SDS-PAGE. An aliquot of 5 μg of each sample was diluted in SDS-PAGE sample buffer with or without 100 mM DTT as a reductant. The samples were boiled for 5 minutes and loaded onto a 10% SDS polyacrylamide gel (LifeGels; French's Forrest, New South Wales, AUS) and electrophoresed. The gel was stained with Coomassie R-250 (Bio-Rad; Hercules, Calif.) to visualize protein bands. For western blot, 0.5 μg/lane total protein was electrophoresed as described above and then electro-transfered to a PVDF membrane and blocked with 5% (w/v) dry milk before probing with anti-flagellin antibody (Inotek; Beverly, Mass.) or serum from mice immunized with a synthetic, lipidated H1C1 peptide. After probing with alkaline phosophatase-conjugated secondary antibodies (Pierce; Rockland, Ill.), protein bands were visualized with an alkaline phosphatase chromogenic substrate (Promega; Madison, Wis.).

[0628] Protein assay: Total protein concentration for all proteins was determined using the Micro BCA (bicinchoninic acid) Assay (Pierce; Rockford Ill.) in the microplate format, using bovine serum albumin as a standard, according to the manufacturer's instructions.

[0629] Endotoxin assay: Endotoxin levels for all proteins were determined using the QCL-1000 Quantitative Chromogenic LAL test kit (Cambrex; E. Rutherford, N.J.), following the manufacturer's instructions for the microplate method.

[0630] TLR5 bioactivity assay: HEK293 cells constitutively express TLR5, and secrete several soluble factors, including IL-8, in response to TLR5 signaling. Cells were seeded in 96-well microplates (50,000 cells/well), and the STF2.4×H1C1 test protein was added. The next day, the conditioned medium was harvested, transferred to a clean 96-well microplate, and frozen at −20° C. After thawing, the conditioned medium was assayed for the presence of IL-8 in a sandwich ELISA using an anti-human IL-8 matched antibody pair (Pierce, Rockland, Ill.; #M801E and #M802B) following the manufacturer's instructions. Optical density was measured using a microplate spectrophotometer (FARCyte, GE/Amersham; Piscataway, N.J.).

### Results and Discussion

[0631] The purified and refolded STF2.4×H1C1 protein (SEQ ID NO: 345) was found to be substantially aggregated as the majority of the protein fractionated in the void volume of the Superdex S200 column (FIG. 26). The protein also had poor in vitro TLR5 activity, with an EC₅₀ value approximately two orders of magnitude higher than the standard flagellin fusion protein STF2.OVA. The purified protein reacted with serum from mice immunized with a synthetic, lipidated H1C1 peptide.

### Expression and Purification of STF2.1×H1C1, a Fusion Protein Comprising Flagellin (TLR5 Agonist) and the Maturational Cleavage SITE Peptide of Influenza A Hemagglutinin

### Materials and methods

[0632] Bacterial cell growth and cell lysis: The STF2.1×H1C1 (SEQ ID NO: 355) construct was expressed in the E. coli host strain BLR(DE3). The strain was retrieved from a glycerol stock and grown in shake flasks to a final volume of 12 L. Cells were grown in LB medium containing 50 μg/ml kanamycin/12.5 μg/ml tetracycline/0.5% dextrose to OD₆₀₀=0.6 and induced with 1 mM IPTG for 3 hours at 37° C. The cells were harvested by centrifugation (7000 rpm×7 minutes in a Sorvall RC5C centrifuge) and resuspended in 20 mM Tris-HCl, pH 8.0, 1 μg/ml DNAseI, 1 mM PMSF, protease inhibitor cocktail and 1 mg/ml lysozyme. The cells were then lysed by two passes through a microfluidizer (Microfluidics; Newton, Mass.) at 15,000 psi. The lysate was centrifuged at 45,000 g for one hour in a Beckman Optima L ultracentrifuge (Beckman Coulter; Fullerton, Calif.) to separate the soluble and insoluble fractions.

[0633] Purification of STF2.1×H1C1 (SEQ ID NO: 342): After centrifugation, the supernatant fraction was collected and passed through a Q sepharose Fast Flow column (GE/Amersham Biosciences; Piscataway, N.J.). The flow-through fraction from this step was supplemented with Triton X-100 (Sigma; St. Louis, Mo.) to a final concentration of 1% (w/v) and passed through the same Q sepharose column. The flow-through fraction was collected again and supplemented with urea to a final concentration of 8 M and citric acid to a final concentration of 20 mM. After adjusting the pH to 3.5 with concentrated HCl, the solution was passed over a Source S column (GE/Amersham Biosciences; Piscataway, N.J.) equilibrated with 20 mM citric acid, pH 3.5.

[0634] The column was then washed with 10 column volumes of equilibration buffer supplemented with 1% (w/v) Triton X-100 to remove endotoxin. The protein was then eluted in a 5-column volume linear gradient of 0 to 1 M NaCl in equilibration buffer. The STF2.1×H1C1 was re-folded by rapid dilution to a final concentration of 0.1 mg/ml protein in refolding buffer [0.1M Tris-HCl, pH 8.0/0.1M NaCl/1% (w/v) glycerol]. The refolded protein was concentrated using a pressurized ultrafiltration stir-cell (Millipore; Billerica, Mass.) and fractionated on a Superdex 200 size-exclusion column (GE/Amersham Biosciences; Piscataway, N.J.).

[0635] SDS-PAGE and western blot analysis: Protein identity was determined, and purity estimated, by SDS-PAGE. An aliquot of 5 μg of each sample was diluted in SDS-PAGE sample buffer with or without 100 mM DTT as a reductant. The samples were boiled for 5 minutes and loaded onto a 10% SDS polyacrylamide gel (LifeGels; French's Forrest, New South Wales, AUS) and electrophoresed. The gel was stained with Coomassie R-250 (Bio-Rad; Hercules, Calif.) to visualize protein bands. For western blot, 0.5 μg/lane total protein was electrophoresed as described above and the gels were then electro-transfered to a PVDF membrane and blocked with 5% (w/v) dry milk before probing with anti-flagellin antibody (Inotek; Beverly, Mass.) or serum from mice immunized with a Pam3Cys.H1C1 peptide (SEQ ID NO: 358). After probing with alkaline phosophatase-conjugated secondary antibodies (Pierce; Rockland, Ill.), protein bands were visualized with an alkaline phosphatase chromogenic substrate (Promega; Madison, Wis.).

### Results and Discussion

[0636] The purified and refolded STF2.1×H1C1 protein (SEQ ID NO: 342) was found to be monomeric as judged by the elution profile on a Superdex 200 gel filtration column. The majority of the protein was found in the included volume with the major peak eluting at approximately 14 mls. This corresponds very closely with the known elution profile of purified, monomeric flagellin on this column. Almost no protein was seen eluting in the void volume, known to be approximately 7 mls for this column, demonstrating that virtually no aggregates are present.

### Immunogenicity and Efficacy of PAM3Cys.H1C1, a Fusion Peptide Comprising PAM3CYS (TLR2 Agonist) and the Maturational Cleavage Site Peptide of Influenza A Hemagglutinin

### Materials and methods

[0637] Peptide design and synthesis: Pam3 (tri-palmoytyl) is the natural ligand for Toll-like Receptor 2 (TLR2), and it is natively expressed as the lipidation motif of bacterial lipoprotein (BLP, SEQ ID NO: 357). Pam3 can be made by chemical synthesis and conjugated to macromolecules such as proteins or coupled to the N-terminus of synthetic peptides using standard peptide synthesis chemistry. This strategy usually involves the synthesis of a peptide of interest concluded by the coupling of Pam3-modified cysteine (Pam3Cys) to the amino terminus to yield the lipopeptide of interest. This approach was used to synthesize a lipidated HA cleavage fragment peptide, Pam3Cys.H1C1 (Pam3Cys-SLWSEENIPSIQSRGLFGAIAGFIEE, SEQ ID NO: 358).

[0638] Mice and immunization: Female BALB/c mice (Jackson Laboratory, Bar Harbor, Me.) were used at the age of 6-8 weeks. Mice were divided into groups of 10 and received inguinal subcutaneous (s.c) immunizations on days 0 and 14 as follows:
[0639] 8) PBS (Phosphate Buffered Saline).
[0640] 9) 20 μg of H1C1 native peptide (SEQ ID NO: 358) in saline buffer (10 mM Histidine, 10 mM Tris, 75 mM NaCl, 5% (vol/vol) sucrose, 0.02% (w/v) Polysorbate-80, 0.1 mM EDTA, 0.5% (v/v) ethanol, pH 7.2)
[0641] 10) 20 μg of Pam3Cys.H1C1 peptide (SEQ ID NO: 358) in saline buffer

[0642] An additional group of five mice received an experimentally determined sublethal challenge with 8×10¹ egg infectious dosages (EID) PR/8/34 and were allowed to convalesce for >21 days. These animals were then used as immune convalescent positive controls during the challenge studies. Mice were bled on days 10 (primary) and 21 (boost), and sera were clarified by clotting and centrifugation and stored at −20° C.

[0643] Serum antibody determination: H1C1-specific IgG levels were determined by ELISA. 96-well ELISA plates (Costar (Cat #9018) Corning, N.Y.) were coated overnight at 4° C. with 100 μl/well H1C1 peptide (SEQ ID NO: 358) in PBS (5 μg/ml). Plates were blocked with 200 μl/well of Assay Diluent Buffer (ADB; BD Pharmingen, (Cat#: 555213) (San Diego, Calif.) for one hour at room temperature. The plates were washed three times in PBS+0.05% (v/v) Tween 20 (PBS-T). Dilutions of the sera in ADB were added (100 μl/well) and the plates were incubated overnight at 4° C. The plates were washed three times with PBS-T. HRP-labeled goat anti-mouse IgG antibodies (Jackson Immunochemical, West Grove, Pa. (Cat#: 115-035-146)) diluted in ADB were added (100 μl/well) and the plates were incubated at room temperature for 1 hour. The plates were washed three times with PBS-T. After adding TMB Ultra substrate (Pierce (Cat 34028), Rockford, Ill.)) and monitoring color development, A₄₅₀ was measured on a Tecan Farcyte (Durham, N.C.) microplate spectrophotometer.

[0644] Influenza virus challenge of mice. To assess efficacy, mice immunized as described above were challenged on day 28 by intranasal administration of an LD₉₀ (dose lethal to 90% of mice) (8×10³ EID) of influenza A isolate PR/8/34. Animals were monitored daily for 21 days following the challenge for survival, weight loss and clinical presentation. The % weight loss was calculated based on the mean of ((Daily weight (g)/Initial weight (g) day 28)×100) of each individual animal per group. Clinical scores were assigned as follows: 4 pts=healthy, 3 pts=reduced grooming, 2 pts=reduced physical activity and 1 pt=moribund. (Experimental results for clinical scores and weight loss reflect the results based on surviving animals on the day evaluated).

### Results and Discussion

[0645] Induction of H1C1-specific antibody responses following immunization with Pam3Cys.H1C1: Mice were immunized with native H1C1 peptide (SEQ ID NO: 358) and the same peptide modified by the addition of an amino terminal Pam3Cys residue, to test the hypothesis that linkage of the peptide to a TLR2 ligand would increase its immunogenicity. Immunogenicity was determined by measuring levels of antibodies to native H1C1 (SEQ ID NO: 358) in the sera of the immunized mice. The results show clearly that mice immunized with the Pam3Cys-modified peptide generated higher antibody titers to the immunizing peptide backbone sequence than did mice immunized with the native peptide (SEQ ID NO: 358) (FIG. 27).

[0646] Protection from lethal influenza virus challenge following immunization with Pam3Cys.H1C1 The results in FIG. 27 demonstrated that immunization of mice with Pam3Cys.H1C1 generated an antibody response that recognized native H1C1 peptide. In order to evaluate efficacy, the same mice were challenged on day 28 with an LD₉₀ (8×10³ EID) of PR/8/34 virus administered intra-nasally. Mice were monitored daily for 21 days following the challenge for survival, weight loss and clinical presentation. As shown in FIG. 28, PBS-immunized mice died between 6 and 10 days post-challenge, while convalescent mice survived beyond the 21-day observation period. Mice immunized with native H1C1 (SEQ ID NO: 358) began to die by day 6 post-infection at a rate similar to the PBS control mice, although 2 of the 10 mice survived beyond the 21-day observation period. In contrast, and similar to the convalescent mice, all mice immunized with Pam3Cys.H1C1 survived beyond the 21-day observation period. Thus, while H1C1 alone is not potently immunogenic (FIG. 27) nor protective (FIG. 28), the same sequence coupled to a TLR2 ligand is both immunogenic and protective.

SEQ ID NO: 340 STF2.blp
ATGGCACAAGTAATCAACACTAACAGTCTGTCGCTGCTGACCCAGAATAA
CCTGAACAAATCCCAGTCCGCACTGGGCACCGCTATCGAGCGTCTGTCTT
CTGGTCTGCGTATCAACAGCGCGAAAGACGATGCGGCAGGTCAGGCGATT
GCTAACCGTTTCACCGCGAACATCAAAGGTCTGACTCAGGCTTCCCGTAA
CGCTAACGACGGTATCTCCATTGCGCAGACCACTGAAGGCGCGCTGAACG
AAATCAACAACAACCTGCAGCGTGTGCGTGAACTGGCGGTTCAGTCTGCT
AACAGCACCAACTCCCAGTCTGACCTCGACTCCATCCAGGCTGAAATCAC
CCAGCGCCTGAACGAAATCGACCGTGTATCCGGCCAGACTCAGTTCAACG
GCGTGAAAGTCCTGGCGCAGGACAACACCCTGACCATCCAGGTTGGCGCC
AACGACGGTGAAACTATCGATATCGATCTGAAGCAGATCAACTCTCAGAC
CCTGGGTCTGGACTCACTGAACGTGCAGAAAGCGTATGATGTGAAAGATA
CAGCAGTAACAACGAAAGCTTATGCCAATAATGGTACTACACTGGATGTA
TCGGGTCTTGATGATGCAGCTATTAAAGCGGCTACGGGTGGTACGAATGG
TACGGCTTCTGTAACCGGTGGTGCGGTTAAATTTGACGCAGATAATAACA
AGTACTTTGTTACTATTGGTGGCTTTACTGGTGCTGATGCCGCCAAAAAT
GGCGATTATGAAGTTAACGTTGCTACTGACGGTACAGTAACCCTTGCGGC
TGGCGCAACTAAAACCACAATGCCTGCTGGTGCGACAACTAAAACAGAAG
TACAGGAGTTAAAAGATACACCGGCAGTTGTTTCAGCAGATGCTAAAAAT
GCCTTAATTGCTGGCGGCGTTGACGCTACCGATGCTAATGGCGCTGAGTT
GGTCAAAATGTCTTATACCGATAAAAATGGTAAGACAATTGAAGGCGGTT
ATGCGCTTAAAGCTGGCGATAAGTATTACGCCGCAGATTACGATGAAGCG
ACAGGAGCAATTAAAGCTAAAACTACAAGTTATACTGCTGCTGACGGCAC
TACCAAAACAGCGGCTAACCAACTGGGTGGCGTAGACGGTAAAACCGAAG
TCGTTACTATCGACGGTAAAACCTACAATGCCAGCAAAGCCGCTGGTCAT
GATTTCAAAGCACAACCAGAGCTGGCGGAAGCAGCCGCTAAAACCACCGA
AAACCCGCTGCAGAAAATTGATGCCGCGCTGGCGCAGGTGGATGCGCTGC
GCTCTGATCTGGGTGCGGTACAAACCGTTTCAACTCTGCTATCACCAACC
TGGGCAATACCGTAAACAATCTGTCTGAAGCGCCTAGCCGTATCGAAGAT
TCCGACTACGCGACCGAAGTTTCCAACATGTCTCGCGCGCAGATTCTGCA
GCAGGCCGGTACTTCCGTTCTGGCGCAGGCTAACCAGGTCCCGCAGAACG
TGCTGAGCCTGTTACGT
SEQ ID NO: 341 HA maturation cleavage fragment
(H1N1)
NIPSIQSRGLFGAIAGFIE
SEQ ID NO: 342 STF2.1xH1C1
MAQVINTNSLSLLTQNNLNKSQSALGTAIERLSSGLRINSALDAAGQAIA
NRFTANIKGLTQASRNANDGISIAQTTEGALNEINNNLQRVRELAVQSAN
STNSQSDLDSIQAEITQRLNEIDRVSGQTQFNGVKVLAQDNTLTIQVGAN
DGETIDIDLKQINSQTLGLDSLNVQKAYDVKDTAVTTKAYANNGTTLDVS
GLDDAAIKAATGGTNGTASVTGGAVKFDADNNKYFVTIGGFTGADAAKNG
DYEVATDGTVTLAAGATKTTMPAGATTKTEVQELKDTPAVVSADAKNALI
AGGVDATDANGAELVKMSYTDKNGKTIEGGYALKAGDKYYAADYDEATGA
IKAKTTSYTAADGTTKTAANQLGGVDGKTEVVTIDGKTYNASKAAGHDFK
AQPELAEAAAKTTENPLQKIDAALAQVDALRSDLGAVQNRFNSAITNLGN
TVNNLSEARSRIEDSDYATEVSNMSRAQILQQAGTSVLAQANQVPQNVLS
LLAMEWENIPSIQSRGLFGAIAGFIE
SEQ ID NO: 343 STF2.2xH1C1
MAQVINTNSLSLLTQNLNKSQSALGTAIERLSSGLRINSAKDDAAGQAIA
NRFTANIKGLTQASRNANDGISIAQTTEGALNEINNNLQRVRELAVQSAN
STNSQSDLDSIQAEITQRLNEIDRVSGQTQFNGVKVLAQDNTLTIQVGAN
DGETIDIDLKQINSQTLGLDSLNVQKAYDVKDTAVTTKAYANNGTTLDVS
GLDDAAIKAATGGTNGTASVTGGAVKFDADNNKYFVTIGGFTGADAAKNG
DYEVNVATDGTVTLAAGATKTTMPAGATTKTEVQELKDTPAVVSADAKNA
LIAGGVDATDANGAELVKMSYTDKNGKTIEGGYALKAGDKYYAADYDEAT
GAIKAKTTSYTAADGTTKTAANQLGGVDGKTEVVTIDGKTYNASKAAGHD
FKAQPELAEAAAKTTENPLQKIDAALAQVDALRSDLGAVQNRFNSAITNL
GNTVNNLSEARSRIEDSDYATEVSNMSRAQILQQAGTSVLIAQANQVPQN
VLSLLAMEWENIPSIQSRGLFGAIAGFIEEWENIPSIQSRGLFGAIAGFI
E
SEQ ID NO: 344 STF2.3xH1C1
MAQVINTNSLSLLTQNNLNKSQSALGTAIERLSSGLRINSAKDDAAGQAI
ANRFTANIKGLTQASRNANDGISIAQTTEGALNEINNNLQRVRELAVQSA
NSTNSQSDLDSIQAEITQRLNEIDRVSGQTQFNGVKVLAQDNTLTIQVGA
DGETIDIDLKQINSQTLGLDSLNVQKAYDVKDTAVTTKAYANNGTTLDVS
GLDDAAIKAATGGTNGTASVTGGAVKFDADNNKYFVTIGGFTGADAAKNG
DYEVNVATDGTVTLAAGATKTTMPAGATTKTEVQELKDTPAVVSADAKNA
LIAGGVDATDANGAELVKMSYTDKNGKTIEGGYALKAGDKYYAADYDEAT
GAIKAKTTSYTAADGTTKTAANQLGGVDGKTEVVTIDGKTYNASKAAGHD
FKAQPELAEAAAKTTENPLQKIDAALAQVDALRSDLGAVQNRFNSAITNL
GNTVNNLSEARSRIEDSDYATEVSNMSRAQILQQAGTSVLAQANQVPQNV
LSLLAMEWENIPSIQSRGLFGAIAGFIEEWENIPSIQSRGLFGAIAGFIE
EWENIPSIQSRGLFGAIAGFIE
SEQ ID NO: 345 STF2.4xH1C1
MAQVINTNSLSLLTQNNLNKSQSALGTAIERLSSGLRINSAKDDAAGQAI
ANRFTANIKGLTQASRNANDGISIAQTTEGALNEINNNLQRVRELAVQSA
NSTNSQSDLDSIQAEITQRLNEIDRVSGQTQFNGVKVLAQDNTLTIQVGA
NDGETIDIDLKQINSQTLGLDSLNVQKAYDVKDTAVTTKAYANNGTTLDV
SGLDDAAIKAATGGTNGTASVTGGAVKFDADNNKYFVTIGGFTGADAAKN
GDYEVNVATDGTVTLAAGATKTTMPAGATTKTEVQELKLTPAVVSADAKN
ALIAGGVDATDANGAELVKMSYTDKNGKTIEGGYALKAGDKYYAADYDEA
TGAIKAKTTSYTAADGTTKTAANQLGGVDGKTEVVTIDGKTYNASKAAGH
DFKAQPELAEAAAKTTENPLQKIDAALAQVDALRSDLGAVQNRFNSAITN
LGNTVNNLSEARSRIEDSDYATEVSNMSRAQILQQAGTSVLAQANQVPQN
VLSLLAMEWENIPSIQRGLFGAIAGFIEEWENIPSIQSRGLFGAIAGFIE
EWENIPSIQSRGLFGAIAGFIEEWENIPSIQSRGLFGAIAGFIE
SEQ ID NO: 346 STF2.4xH1C2
MAQVINTNSLSLLTQNNLNKSQSALGTAIERLSSGLRINSAKDDAAGQAI
ANRFTANIKGLTQASRNANDGISIAQTTEGALNEINNNLQRVRELAVQSA
NSTNSQSDLDSIQAEITQRLNEIDRVSGQTQFNGVKVLAQDNTLTIQVGA
DGETIDIDLKQINSQTLGLDSLNVQKAYDVKDTAVTTKAYANNGTTLDVS
GLDDAAIKAATGGTNGTASVTGGAVKFDADNNKYFVTIGGFTGADAAKNG
DYEVNVATDGTVTLAAGATKTTMPAGATTKTEVQELKDTPAVVSADAKNA
LIAGGVDATDANGAELVKMSYTDKNGKTIEGGYALKAGDKYYAADYDEAT
GAIKAKTTSYTAADGTTKTAANQLGGVDGKTEVVTIDGKTYNASKAAGHD
FKAQPELAEAAAKTTENPLQKIDAALLAQVDALRSDLGAVQNRFNSAITN
LGNTVNNLSEARSRIEDSDYATEVSNMSRAQILQQAGTSVLAQANQVPQN
VLSLLAGCGSEWENIPSIQSRGLFGAIAGFIEEWENIPSIQSRGLFGAIA
GFIEEWENIPSIQSRGLFGAIAGFIEEWENIPSIQSRGLFGAIAGFIESG
C
SEQ ID NO: 347 HA maturation cleavage fragment
(H5N1)
RERRRKKRGLFGAIAGFIE
SEQ ID NO: 348 STF2.4xH5C1
MAQVINTNSLSLLTQNNLNKSQSALGTAIERLSSGLRINSAKDDAAGQAI
ANRFTANIKGLTQASRNANDGISIAQTTEGALNEINNNLQRVRELAVQSA
NSTNSQSDLDSIQAEITQRLNEIDRVSGQTQFNGVKVLAQDNTLTIQVGA
NDGETIDIDLKQINSQTLGLDSLNVQKAYDVKDTAVTTKAYANNGTTLDV
SGLDDAAIKAATGGTNGTASVTGGAVKFDADNNKYFVTIGGFTGADAAKN
GDYEVNVATDGTVTLAAGATKTTMPAGATTKTEVQELKDTPAVVSADAKN
ALIAGGVDATDANGAELVKMSYTDKNGKTIEGGYALKAGDKYYAALYDEA
TGAIKAKTTSYTAADGTTKTAANQLGGVDGKTEVVTIDGKTYNASKAAGH
DFKAQPELAEAAAKTTENPLQKIDAALAQVDALRSDLGAVQNRFNSAITN
LGNTVNNLSEARSRIEDSDYATEVSNMSRAQILQQAGTSVLAQANQVPQN
VLSLLAEWERERKKRGLFGAIAGFIEEWERERRRKKRGLFGAIAGFIEEW
RERRRKKRGLFGAIAGFIEEWERERRRKKRGLFGAIAGFIE
SEQ ID NO: 349 HA maturation cleavage fragment
(H3N2)
NVPEKQTRGIFGAIAGFIE
SEQ ID NO: 350 HA maturation cleavage fragment
(H2N1/H2N2/H2N3/H2N5/H2N8/H2N9)
NVPQIESRGLFGAIAGFIE
SEQ ID NO: 351 HA maturation cleavage fragment
(B strain)
PAKLLKERGFFGAIAGFLE
SEQ ID NO: 352 STF2.4xH1C1
ATGGCACAAGTAATCAACACTAACAGTCTGTCGCTGCTGACCCAGAATAA
CCTGAACAAATCCCAGTCCGCACTGGGCACCGCTATCGAGCGTCTGTCTT
CTGGTCTGCGTATCAACAGCGCGAAAGACGATGCGGCAGGTCAGGCGATT
GCTAACCGTTTCACCGCGAACATCAAAGGTCTGACTCAGGCTTCCCGTAA
CGCTAACGACGGTATCTCCATTGCGCAGACCACTGAAGGCGCGCTGAACG
AAATCAACAACAACCTGCAGCGTGTGCGTGAACTGGCGGTTCAGTCTGCT
AACAGCACCAACTCCCAGTCTGACCTCGACTCCATCCAGGCTGAAATCAC
CCAGCGCCTGAACGAAATCGACCGTGTATCCGGCCAGACTCAGTTCAACG
GCGTGAAAGTCCTGGCGCAGGACAACACCCTGACCATCCAGGTTGGCGCC
AACGACGGTGAAACTATCGATATCGATCTGAAGCAGATCAACTCTCAGAC
CCTGGGTCTGGACTCACTGAACGTGCAGAAAGCGTATGATGTGAAAGATA
CAGCAGTAACAACGAAAGCTTATGCCAATAATGGTACTACACTGGATGTA
TCGGGTCTTGATGATGCAGCTATTAAAGCGGCTACGGGTGGTACGAATGG
TACGGCTTCTGTAACCGGTGGTGCGGTTAAATTTGACGCAGATAATAACA
AGTACTTTGTTACTATTGGTGGCTTTACTGGTGCTGATGCCGCCAAAAAT
GGCGATTATGAAGTTAACGTTGCTACTGACGGTACAGTAACCCTTGCGGC
TGGCGCAACTAAAACCACAATGCCTGCTGGTGCGACAACTAAAACAGAAG
TACAGGAGTTAAAAGATACACCGGCAGTTGTTTCAGCAGATGCTAAAAAT
GCCTTAATTGCTGGCGGCGTTGACGCTACCGATGCTAATGGCGCTGAGTT
GGTCAAAATGTCTTATACCGATAAAAATGGTAAGACAATTGAAGGCGGTT
ATGCGCTTAAAGCTGGCGATAAGTATTACGCCGCAGATTACGATGAAGCG
ACAGGAGCAATTAAAGCTAAAACTACAAGTTATACTGCTGCTGACGGCAC
TACCAAAACAGCGGCTAACCAACTGGGTGGCGTAGACGGTAAAACCGAAG
TCGTTACTATCGACGGTAAAACCTACAATGCCAGCAAAGCCGCTGGTCAT
GATTTCAAAGCACAACCAGAGCTGGCGGAAGCAGCCGCTAAAACCACCGA
AAACCCGCTGCAGAAAATTGATGCCGCGCTGGCGCAGGTGGATGCGCTGC
GCTCTGATCTGGGTGCGGTACAAAACCGTTTCAACTCTGCTATCACCAAC
CTGGGCAATACCGTAAACAATCTGTCTGAAGCGCGTAGCCGTATCGAAGA
TTCCGACTACGCGACCGAAGTTTCCAACATGTCTCGCGCGCAGATTCTGC
AGCAGGCCGGTACTTCCGTTCTGGCGCAGGCTAACCAGGTCCCGCAGAAC
GTGCTGTCTCTGTTAGCGATGGAATGGGAGAACATCCCTAGCATCCAATC
TCGCGGCCTGTTTGGCGCTATCGCGGGCTTTATCGAAGAATGGGAGAACA
TCCCGAGCATCCAATCTCGCGGTCTGTTTGGTGCGATCGCTGGTTTCATC
GAGGAGTGGGAGAACATTCCTAGCATTCAAAGCCGTGGCCTGTTCGGCGC
TATTGCAGGTTTTATTGAAGAATGGGAAAATATCCCGTCTATCCAATCCC
GCGGTCTGTTCGGCGCGATCGCAGGTTTCATTGAATAATAAGCTAAGC
SEQ ID NO: 353 STF2.3xH1C1
ATGGCACAAGTAATCAACACTAACAGTCTGTCGCTGCTGACCCAGAATAA
CCTGAACAAATCCCAGTCCGCACTGGGCACCGCTATCGAGCGTCTGTCTT
CTGGTCTGCGTATCAACAGCGCGAAAGACGATGCGGCAGGTCAGGCGATT
GCTAACCGTTTCACCGCGAACATCAAAGGTCTGACTCAGGCTTCCCGTAA
CGCTAACGACGGTATCTCCATTGCGCAGACCACTGAAGGCGCGCTGAACG
AAATCAACAACAACCTGCAGCGTGTGCGTGAACTGGCGGTTCAGTCTGCT
AACAGCACCAACTCCCAGTCTGACCTCGACTCCATCCAGGCTGAAATCAC
CCAGCGCCTGAACGAAATCGACCGTGTATCCGGCCAGACTCAGTTCAACG
GCGTGAAAGTCCTGGCGCAGGACAACACCCTGACCATCCAGGTTGGCGCC
AACGACGGTGAAACTATCGATATCGATCTGAAGCAGATCAACTCTCAGAC
CCTGGGTCTGGACTCACTGAACGTGCAGAAAGCGTATGATGTGAAAGATA
CAGCAGTAACAACGAAAGCTTATGCCAATAATGGTACTACACTGGATGTA
TCGGGTCTTGATGATGCAGCTATTAAAGCGGCTACGGGTGGTACGAATGG
TACGGCTTCTGTAACCGGTGGTGCGGTTAAATTTGACGCAGATAATAACA
AGTACTTTGTTACTATTGGTGGCTTTACTGGTGCTGATGCCGCCAAAAAT
GGCGATTATGAAGTTAACGTTGCTACTGACGGTACAGTAACCCTTGCGGC
TGGCGCAACTAAAACCACAATGCCTGCTGGTGCGACAACTAAAACAGAAG
TACAGGAGTTAAAAGATACACCGGCAGTTGTTTCAGCAGATGCTAAAAAT
GCCTTAATTGCTGGCGGCGTTGACGCTACCGATGCTAATGGCGCTGAGTT
GGTCAAAATGTCTTATACCGATAAAAATGGTAAGACAATTGAAGGCGGTT
ATGCGCTTAAAGCTGGCGATAAGTATTACGCCGCAGATTACGATGAAGCG
ACAGGAGCAATTAAAGCTAAAACTACAAGTTATACTGCTGCTGACGGCAC
TACCAAAACAGCGGCTAACCAACTGGGTGGCGTAGACGGTAAAACCGAAG
TCGTTACTATCGACGGTAAAACCTACAATGCCAGCAAAGCCGCTGGTCAT
GATTTCAAAGCACAACCAGAGCTGGCGGAAGCAGCCGCTAAAACCACCGA
AAACCCGCTGCAGAAAATTGATGCCGCGCTGGCGCAGGTGGATGCGCTGC
GCTCTGATCTGGGTGCGGTACAAAACCGTTTCAACTCTGCTATCACCAAC
CTGGGCAATACCGTAAACAATCTGTCTGAAGCGCGTAGCCGTATCGAAGA
TTCCGACTACGCGACCGAAGTTTCCAACATGTCTCGCGCGCAGATTCTGC
AGCAGGCCGGTACTTCCGTTCTGGCGCAGGCTAACCAGGTCCCGCAGAAC
GTGCTGAGCCTGTTAGCGATGGAATGGGAAAATATCCCTAGCATCCAATC
TCGCGGTCTGTTCGGTGCTATTGCTGGCTTCATCGAGGAATGGGAGAACA
TCCCATCTATTCAGTCTCGCGGCCTGTTTGGTGCGATCGCGGGTTTTATT
GAGGAATGGGAAAACATTCCAAGCATTCAGTCACGTGGTCTTTTCGGCGC
CATCGCTGGTTTTATCGAATGATAAGCTTAGCCCAAGG
SEQ ID NO: 354 STF2.2xH1C1
ATGGCACAAGTAATCAACACTAACAGTCTGTCGCTGCTGACCCAGAATAA
CCTGAACAAATCCCAGTCCGCACTGGGCACCGCTATCGAGCGTCTGTCTT
CTGGTCTGCGTATCAACAGCGCGAAAGACGATGCGGCAGGTCAGGCGATT
GCTAACCGTTTCACCGCGAACATCAAAGGTCTGACTCAGGCTTCCCGTAA
CGCTAACGACGGTATCTCCATTGCGCAGACCACTGAAGGCGCGCTGAACG
AAATCAACAACAACCTGCAGCGTGTGCGTGAACTGGCGGTTCAGTCTGCT
AACAGCACCAACTCCCAGTCTGACCTCGACTCCATCCAGGCTGAAATCAC
CCAGCGCCTGAACGAAATCGACCGTGTATCCGGCCAGACTCAGTTCAACG
GCGTGAAAGTCCTGGCGCAGGACAACACCCTGACCATCCAGGTTGGCGCC
AACGACGGTGAAACTATCGATATCGATCTGAAGCAGATCAACTCTCAGAC
CCTGGGTCTGGACTCACTGAACGTGCAGAAAGCGTATGATGTGAAAGATA
CAGCAGTAACAACGAAAGCTTATGCCAATAATGGTACTACACTGGATGTA
TCGGGTCTTGATGATGCAGCTATTAAAGCGGCTACGGGTGGTACGAATGG
TACGGCTTCTGTAACCGGTGGTGCGGTTAAATTTGACGCAGATAATAACA
AGTACTTTGTTACTATTGGTGGCTTTACTGGTGCTGATGCCGCCAAAAAT
GGCGATTATGAAGTTAACGTTGCTACTGACGGTACAGTAACCCTTGCGGC
TGGCGCAACTAAAACCACAATGCCTGCTGGTGCGACAACTAAAACAGAAG
TACAGGAGTTAAAAGATACACCGGCAGTTGTTTCAGCAGATGCTAAAAAT
GCCTTAATTGCTGGCGGCGTTGACGCTACCGATGCTAATGGCGCTGAGTT
GGTCAAAATGTCTTATACCGATAAAAATGGTAAGACAATTGAAGGCGGTT
ATGCGCTTAAAGCTGGCGATAAGTATTACGCCGCAGATTACGATGAAGCG
ACAGGAGCAATTAAAGCTAAAACTACAAGTTATACTGCTGCTGACGGCAC
TACCAAAACAGCGGCTAACCAACTGGGTGGCGTAGACGGTAAAACCGAAG
TCGTTACTATCGACGGTAAAACCTACAATGCCAGCAAAGCCGCTGGTCAT
GATTTCAAAGCACAACCAGAGCTGGCGGAAGCAGCCGCTAAAACCACCGA
AAACCCGCTGCAGAAAATTGATGCCGCGCTGGCGCAGGTGGATGCGCTGC
GCTCTGATCTGGGTGCGGTACAAAACCGTTTCAACTCTGCTATCACCAAC
CTGGGCAATACCGTAAACAATCTGTCTGAAGCGCGTAGCCGTATCGAAGA
TTCCGACTACGCGACCGAAGTTTCCAACATGTCTCGCGCGCAGATTCTGC
AGCAGGCCGGTACTTCCGTTCTGGCGCAGGCTAACCAGGTCCCGCAGAAC
GTGCTGAGCCTGTTAGCGATGGAATGGGAAAATATCCCTAGCATCCAATC
TCGCGGTCTGTTCGGTGCTATTGCTGGCTTCATCGAGGAATGGGAGAACA
TCCCATCTATTCAGTCTCGCGGCCTGTTTGGTGCGATCGCGGGTTTTATT
GAGTGATAAGCTTAGCCCAAGG
SEQ ID NO: 355 STF2.1xH1C1
ATGGCACAAGTAATCAACACTAACAGTCTGTCGCTGCTGACCCAGAATAA
CCTGAACAAATCCCAGTCCGCACTGGGCACCGCTATCGAGCGTCTGTCTT
CTGGTCTGCGTATCAACAGCGCGAAAGACGATGCGGCAGGTCAGGCGATT
GCTAACCGTTTCACCGCGAACATCAAAGGTCTGACTCAGGCTTCCCGTAA
CGCTAACGACGGTATCTCCATTGCGCAGACCACTGAAGGCGCGCTGAACG
AAATCAACAACAACCTGCAGCGTGTGCGTGAACTGGCGGTTCAGTCTGCT
AACAGCACCAACTCCCAGTCTGACCTCGACTCCATCCAGGCTGAAATCAC
CCAGCGCCTGAACGAAATCGACCGTGTATCCGGCCAGACTCAGTTCAACG
GCGTGAAAGTCCTGGCGCAGGACAACACCCTGACCATCCAGGTTGGCGCC
AACGACGGTGAAACTATCGATATCGATCTGAAGCAGATCAACTCTCAGAC
CCTGGGTCTGGACTCACTGAACGTGCAGAAAGCGTATGATGTGAAAGATA
CAGCAGTAACAACGAAAGCTTATGCCAATAATGGTACTACACTGGATGTA
TCGGGTCTTGATGATGCAGCTATTAAAGCGGCTACGGGTGGTACGAATGG
TACGGCTTCTGTAACCGGTGGTGCGGTTAAATTTGACGCAGATAATAACA
AGTACTTTGTTACTATTGGTGGCTTTACTGGTGCTGATGCCGCCAAAAAT
GGCGATTATGAAGTTAACGTTGCTACTGACGGTACAGTAACCCTTGCGGC
TGGCGCAACTAAAACCACAATGCCTGCTGGTGCGACAACTAAAACAGAAG
TACAGGAGTTAAAAGATACACCGGCAGTTGTTTCAGCAGATGCTAAAAAT
GCCTTAATTGCTGGCGGCGTTGACGCTACCGATGCTAATGGCGCTGAGTT
GGTCAAAATGTCTTATACCGATAAAAATGGTAAGACAATTGAAGGCGGTT
ATGCGCTTAAAGCTGGCGATAAGTATTACGCCGCAGATTACGATGAAGCG
ACAGGAGCAATTAAAGCTAAAACTACAAGTTATACTGCTGCTGACGGCAC
TACCAAAACAGCGGCTAACCAACTGGGTGGCGTAGACGGTAAAACCGAAG
TCGTTACTATCGACGGTAAAACCTACAATGCCAGCAAAGCCGCTGGTCAT
GATTTCAAAGCACAACCAGAGCTGGCGGAAGCAGCCGCTAAAACCACCGA
AAACCCGCTGCAGAAAATTGATGCCGCGCTGGCGCAGGTGGATGCGCTGC
GCTCTGATCTGGGTGCGGTACAAAACCGTTTCAACTCTGCTATCACCAAC
CTGGGCAATACCGTAAACAATCTGTCTGAAGCGCGTAGCCGTATCGAAGA
TTCCGACTACGCGACCGAAGTTTCCAACATGTCTCGCGCGCAGATTCTGC
AGCAGGCCGGTACTTCCGTTCTGGCGCAGGCTAACCAGGTCCCGCAGAAC
GTGCTGAGCCTGTTAGCGATGGAATGGGAAAATATCCCTAGCATCCAATC
TCGCGGTCTGTTCGGTGCTATTGCTGGCTTCATCGAGTGATAAGCTTAGC
CCAAGG
SEQ ID NO: 356 STF2.4xH1C1
ATGGCACAAGTAATCAACACTAACAGTCTGTCGCTGCTGACCCAGAATAA
CCTGAACAAATCCCAGTCCGCACTGGGCACCGCTATCGAGCGTCTGTCTT
CTGGTCTGCGTATCAACAGCGCGAAAGACGATGCGGCAGGTCAGGCGATT
GCTAACCGTTTCACCGCGAACATCAAAGGTCTGACTCAGGCTTCCCGTAA
CGCTAACGACGGTATCTCCATTGCGCAGACCACTGAAGGCGCGCTGAACG
AAATCAACAACAACCTGCAGCGTGTGCGTGAACTGGCGGTTCAGTCTGCT
AACAGCACCAACTCCCAGTCTGACCTCGACTCCATCCAGGCTGAAATCAC
CCAGCGCCTGAACGAAATCGACCGTGTATCCGGCCAGACTCAGTTCAACG
GCGTGAAAGTCCTGGCGCAGGACAACACCCTGACCATCCAGGTTGGCGCC
AACGACGGTGAAACTATCGATATCGATCTGAAGCAGATCAACTCTCAGAC
CCTGGGTCTGGACTCACTGAACGTGCAGAAAGCGTATGATGTGAAAGATA
CAGCAGTAACAACGAAAGCTTATGCCAATAATGGTACTACACTGGATGTA
TCGGGTCTTGATGATGCAGCTATTAAAGCGGCTACGGGTGGTACGAATGG
TACGGCTTCTGTAACCGGTGGTGCGGTTAAATTTGACGCAGATAATAACA
AGTACTTTGTTACTATTGGTGGCTTTACTGGTGCTGATGCCGCCAAAAAT
GGCGATTATGAAGTTAACGTTGCTACTGACGGTACAGTAACCCTTGCGGC
TGGCGCAACTAAAACCACAATGCCTGCTGGTGCGACAACTAAAACAGAAG
TACAGGAGTTAAAAGATACACCGGCAGTTGTTTCAGCAGATGCTAAAAAT
GCCTTAATTGCTGGCGGCGTTGACGCTACCGATGCTAATGGCGCTGAGTT
GGTCAAAATGTCTTATACCGATAAAAATGGTAAGACAATTGAAGGCGGTT
ATGCGCTTAAAGCTGGCGATAAGTATTACGCCGCAGATTACGATGAAGCG
ACAGGAGCAATTAAAGCTAAAACTACAAGTTATACTGCTGCTGACGGCAC
TACCAAAACAGCGGCTAACCAACTGGGTGGCGTAGACGGTAAAACCGAAG
TCGTTACTATCGACGGTAAAACCTACAATGCCAGCAAAGCCGCTGGTCAT
GATTTCAAAGCACAACCAGAGCTGGCGGAAGCAGCCGCTAAAACCACCGA
AAACCCGCTGCAGAAAATTGATGCCGCGCTGGCGCAGGTGGATGCGCTGC
GCTCTGATCTGGGTGCGGTACAAAACCGTTTCAACTCTGCTATCACCAAC
CTGGGCAATACCGTAAACAATCTGTCTGAAGCGCGTAGCCGTATCGAAGA
TTCCGACTACGCGACCGAAGTTTCCAACATGTCTCGCGCGCAGATTCTGC
AGCAGGCCGGTACTTCCGTTCTGGCGCAGGCTAACCAGGTCCCGCAGAAC
GTGCTGTCTCTGTTAGCGGGTTGTGGTTCCGAGTGGGAAAATATTCCGTC
TATCCAGAGCCGTGGTCTGTTCGGCGCAATTGCTGGCTTCATTGAAGAAT
GGGAAAACATCCCGTCCATCCAGAGCCGTGGCCTGTTCGGCGCCATTGCT
GGTTTCATCGAGGAATGGGAAAACATTCCGTCCATCCAGTCCCGCGGTCT
GTTTGGCGCTATCGCCGGTTTCATTGAGGAATGGGAAAATATCCCTTCCA
TCCAGTCTCGTGGTCTGTTCGGCGCGATTGCAGGCTTTATCGAATCTGGT
TGCTAATAAGCTAAGC
SEQ ID NO: 357 Bacterial lipoprotein of E. coli
MKATKLVLGAVILGSTLLAGCSSNAKIDQLSSDVQTLNAKVDQLSNDVNA
MRSDVQAAKDDAAPANQRLDNMATKYRK
SEQ ID NO: 358 H1C1 native peptide
SLWSEENIPSIQSRGLFGAIAGFIEE

### Example 15

### Flagellin-M2e Fusion Proteins

[0647] M2e is conserved across multiple influenza A subtypes (also referred to herein as “strain”). M2e is at least a portion of the M2 protein, in particular, a 24 amino-terminus (also referred to herein as an “ectodomain”) of the M2 protein. The M2 ectodomain is relatively small amino acid sequence (24 amino acids) compared to HA (about 566 amino acids) and NA (about 469 amino acids). The M2e sequence of exemplary avian influenza A isolates differs from that of human isolates, but is highly-conserved among the avian isolates (see, for example, SEQ ID NOS: 544-556, 570 and 573-578). Four tandem copies of M2e fused to the carboxy terminus of a flagellin STF2 (full-length or STF2 hinge region-deleted) were generated. The STF2 without the hinge region is also referred to herein as “STF2Δ.”

Construction of Fusion Protein

[0648] The carboxy-terminal fusion of the synthetic 4×M2e sequence (4 consecutive 24 amino acid sequences) with STF2 was constructed as follows. The pET24A vector was purchased from Novagen, San Diego, Calif. The strategy employed the Seamless Cloning Kit (Catalog number 214400) from Stratagene (La Jolla, Calif. www.stratagene.com) performed by DNA 2.0 Inc. (Menlo Park, Calif.). The gene encoding the fusion protein was in pDrive 4×M2e G00448 and was used as a PCR template for insert preparation for construction of the C-terminal fusion expression construct with STF2. The synthetic 4×M2e construct pDrive 4×M2e G00448 was used as a template for PCR as outlined in the Seamless Cloning Kit (Catalog number 214400) from Stratagene (La Jolla, Calif.). The expected product from this amplification includes the 318 bp and the restriction enzyme sites incorporated into the oligonucleotides used to amplify this insert. The procedure was as follows:

PCR Conditions

1 μL −20 ng of pDrive 4×M2e G00448

5 μL of 10× cloned Pfu polymerase buffer

1 μL of 40 mM dNTP mix

1 μL −10 μmol of forward primer 4×M2eforbs1

1 μL −10 μmol of reverse primer 4×M2erevwsto

40 μL ddH₂O

[0649] Immediately before starting the thermal cycling 1 μL of PfuTurbo DNA Polymerase the following were added.

4Xm2eforbs1 primer sequence:

(SEQ ID NO: 566)

5′-CGCTCTTCAMTGAGCTTGCTGACTGAGGTTGAGACCCCGATTC
4xM2erevwsto primer sequence:

(SEQ ID NO: 567)

5′-CGCTCTTCACGCTTATTATCTAGACGGGTCTGAGCTATCGTTAGAGC
GAG

[0650] This reaction was cycled as follows on a Thermo Hybaid PxE thermal cycler (Waltham, Mass.).

Initial cycle

| Temperature | Duration |
|---|---|
| 95° | 3 minutes |
| 65° | 1 minute |
| 72° | 1 minute |

[0651] Subsequent nine cycles

| Temperature | Duration |
|---|---|
| 95° | 45 seconds |
| 65° | 35 seconds |
| 72° | 1 minute |

[0652] At this point the following was added to each reaction.

5 μL of 10× cloned Pfu polymerase buffer

1 μL of 5-methyl dNTP mix

44 μL ddH₂O

[0653] Subsequently the following thermal cycling was repeated five times.

| Temperature | Duration |
|---|---|
| 95° | 45 seconds |
| 65° | 35 seconds |
| 72° | 1 minute |

[0654] The 100 μL product was brought to a volume of 300 μL by the addition of TE buffer. The resulting product was phenol chloroform (Invitrogen Carlsbad, Calif.-Catalog number 15593-031) extracted once and chloroform extracted once. The amplification product was then ethanol precipitated by addition of 30 μL of Sodium acetate buffer pH 5.2 and 750 μL of 100% Ethanol. The DNA pellet washed twice with 300 μL 70% Ethanol allowed to air dry for ten minutes and then resuspended in 50 μL TE buffer.

Amplification of Vector STF2 in pET24.

[0655] The previously constructed pET24a/STF2.M2e construct was used as a template for PCR as outlined in the Seamless Cloning Kit (Catalog number 214400) from Stratagene (La Jolla, Calif.). The expected product from this amplification includes the whole of the pET24 plasmid plus the STF2 sequences but does not include the single copy of M2E that exists in this construct. The procedure was as follow:

PCR Conditions

1 μL −40 ng of STF2.M2E pET22-2

5 μL of 10× cloned Pfu polymerase buffer

1 μL of 40 mM dNTP mix

1 μL −10 μmol of primer 4×MECpET24

1 μL −10 μmol of primer 4×M2eC-STF2

40 μL ddH₂O

[0656] Immediately before starting the thermal cycling the following were added:

[0657] 1 μL of PfuTurbo DNA Polymerase

4xMECpET24 primer sequence:

(SEQ ID NO: 568)

5′-GCTCTTCAGCGGCTGAGCAATAACTAGCATAACCCCTTGGG
4xM2eC-STF2 primer sequence:

(SEQ ID NO: 569)

5′-CGCTCTTCACAGACGTAACAGAGACAGCACGTTCTGCGG

[0658] This reaction was cycled as follows on a Thermo Hybaid PxE thermal cycler (Waltham, Mass.).

Initial cycle

| Temperature | Duration |
|---|---|
| 95° | 3 minutes |
| 65° | 1 minute |
| 72° | 18 minutes |

[0659] Subsequent nine cycles

| Temperature | Duration |
|---|---|
| 95° | 45 seconds |
| 65° | 35 seconds |
| 72° | 18 minutes |

[0660] At this point the following was added to each reaction.

5 μL of 10× cloned Pfu polymerase buffer

1 μL of 5-methyl dNTP mix

44 μL ddH₂O

[0661] Subsequently the following thermal cycling was repeated five times.

| Temperature | Duration |
|---|---|
| 95° | 45 seconds |
| 65° | 35 seconds |
| 72° | 18 minutes |

[0662] The 100 μL product was brought to a volume of 300 μL by the addition of TE buffer. The resulting product was phenol chloroform (Invitrogen Carlsbad, Calif.-Catalog number 15593-031) extracted once and chloroform extracted once. The amplification product was then ethanol precipitated by addition of 30 μL of Sodium acetate buffer pH 5.2 and 750 μL of 100% Ethanol. The DNA pellet washed twice with 300 μL 70% Ethanol allowed to air dry for ten minutes and then resuspended in 50 μL TE buffer.

Digestion and Ligation of Vector and Insert Amplifications

[0663] Eam 1104 I digests were set up separately for vector and insert as follows:

[0664] 30 μL of amplified product after ethanol precipitation

[0665] 5 μL of 10× Universal buffer (Supplied with Seamless Cloning Kit)

[0666] 4 μL Eam 1104 I restriction enzyme (Supplied with Seamless Cloning Kit)

[0667] 11 μL ddH₂O

[0668] Digests were mixed gently and incubated at 37° C. for one hour and ligation reactions of vector and insert products were prepared as above performed as follows (Reagents supplied with Seamless Cloning Kit):

[0669] Ingredients added in order listed:

[0670] 9 μL ddH₂O

[0671] 5 μL of Eam 1104 I digested 4×M2e amplified insert

[0672] 5 μL of Eam 1104 I digested STF2.M2E pET22-2 amplified vector

[0673] 2 μL 10× Ligase buffer

[0674] 2 μL 10 mM rATP

[0675] 1 μL T4 DNA Ligase (diluted from stock 1:16)

[0676] 1 μL Eam 1104 I restriction enzyme

[0677] The ligation reactions were mixed gently and incubated for 30 minutes at 37° C. The ligations were then stored on ice until transformed into XL-10 competent cells (Stratagene Catalog number 200314) later than same day.

Transformation of Ligation into XL-10 Competent Cells

[0678] Eppendorf tubes were chilled for ten minutes while the XL-10 (Stratagene Catalog number 200314) competent cells thawed on ice.

[0679] 50 μL of competent cells were aliquoted from the stock tube per ligation.

[0680] 2 μL of β-mercaptoethanol stock which is provided with the XL-10 cells.

[0681] This mixture was incubated for ten minutes on ice gently mixing every 2 minutes. Seamless cloning ligation reaction (4 μl) was added, swirled gently and then incubated on ice for 30 minutes. The tubes were heat shocked for 35 seconds at 42° C. in a water bath. The tubes were incubated on ice for at least two minutes. SOC medium (400 μL) were added to the cells and incubated for one hour at 37° C. with agitation.

[0682] Two LB agar kanamycin (50 μg/mL) plates are used to plate 200 μL and 10 μL of the transformed cells and allowed to grow overnight.

Screening of Kanamycin Resistant Clones

[0683] Recombinant candidates were grown up for minipreps in Luria Broth containing Kanamycin (25 ug/mL) and extracted using the QIAprep Spin Miniprep Kit (Qiagen Valencia, Calif. Catalog Number 27106). Candidate clones were screened by restriction enzymes (New England Biolabs Beverly, Mass.) and positive clones were grown up in 100 mL of Luria Broth containing kanamycin (25 ug/mL) and extracted using the Qiagen HiSpeed Plasmid Midi Kit (Catalog number 12643). These clones were submitted to GENEWIZ (North Brunswick; NJ) for sequencing.

Production and Purification of STF2.4×M2e Fusion Protein

[0684] STF2.4×M2e in E. coli BLR(DE3)pLysS host (Novagen, San Diego, Calif., Catalog #69053) was retrieved from glycerol stock and scaled up to 5 L. Cells were grown in LB medium containing 15 μg/ml Kanamycin and 12.5 μg/ml Teteracycline to OD₆₀₀=0.4 and induced with 1 mM IPTG for 3 h at 37° C. The cells were harvested by centrifugation (7000 rpm×7 minutes in a Sorvall RC5C centrifuge) and resuspended in 2×PBS, 1% glycerol, DNAse, 1 mM PMSF, protease inhibitor cocktail and 1 mg/ml lysozyme. The suspension was passed through a microfluidizer to lyse the cells. The lysate was centrifuged (45,000 g for one hour in a Beckman Optima L ultracentrifuge) to separate the soluble fraction from inclusion bodies. Protein was detected by SDS-PAGE in the soluble and insoluble fractions.

[0685] The soluble fraction was applied to Sepharose Q resin in the presence of high salt via batch method to reduce DNA, endotoxin, and other contaminants. The flow through containing the protein of interest was loaded onto 30 ml Q Sepharose column (Amersham Biosciences). Bound protein was eluted using a linear gradient from Buffer A to B. (Buffer A: 100 mM Tris-Cl, pH 8.0. Buffer B: 100 mM Tris-Cl, 1 M NaCl, pH 8.0). Eluted protein was further purified using a 45 ml Source Q column that provided greater resolution needed to resolve contaminating proteins. Bound protein was eluted with a linear gradient from Buffer A to B (Buffer A: 100 mM Tris-Cl, pH 8.0 Buffer B: 100 mM Tris-Cl, 1 M NaCl, pH 8.0).

[0686] Final purification of protein was completed using Superdex-200 gel filtration chromatography. The column was developed with 100 mM Tris, 150 mM NaCl and 1% glycerol plus 1% Na-deoxycholate to remove the LPS. Buffer exchange was carried out using overnight dialysis against buffer containing 50 mM Tris, 100 mM NaCl and 1% glycerol was done to remove Na-deoxycholate. Protein concentration was determined by the MicroBCA Protein Assay Reagent Kit (Pierce Biotechnology). Purified preparations of STF2.4×M2e yielded a single band visible with Coomassie stain that migrated with an apparent molecular weight of about 64 kDa on 12% SDS polyacrylamide gels.

### Example 16

### Expression and Purification of Flagellin (STF2 and STF2Δ) Fusion Protein Constructs Encoding Influenza A M2 Ectodomain Sequences

[0687] The consensus M2e sequences from several influenza A strains of human and avian origin are depicted in SEQ ID NOS: 544-556, 570 and 573-578. To facilitate the cloning of the M2e sequence, two vector cassettes, pMT/STF2 and pMT/STF2Δ, each containing a multiple cloning site (MCS) were generated (See FIGS. 17A and 17B). To generate pMT/STF2, the 1.5 kb gene encoding full length flagellin of Salmonella typhimurium fljb type 2, or STF2, was fused to the Ig binding protein (BIP) secretion signal of pMTBIP/V5-His vector (Invitrogen Corporation, Carlsbad, Calif.) for expression in Drosophila. The BiP sequence is included at the 5′ end of the construct as a secretion signal for expression in Drosophila. A chemically-synthesized 4×M2e gene representing the H1, H2 and H3 consensus sequence, SEQ ID NO: 544, was cloned into the MCS of pMT/STF2 to create pMT/STF2.4×M2e(H1).

[0688] A similar strategy prophetically is employed to clone two H5-associated M2e sequences, SLLTEVETPTRNEWECRCSDSSDP (SEQ ID NO: 553) (A/Viet Nam/1203/2004) and SLLTEVETLTRNGWGCRCSDSSDP (SEQ ID NO: 552) (A/Hong Kong/156/97). Codon-optimized chemically synthesized genes containing four tandemly repeated copies of the indicated H5-associated M2e sequence prophetically are cloned into pMT/STF2 to generate STF2.4×M2e(HSVN) and STF2.4×M2e(H5HK), respectively. To generate a construct that contains multiple M2e forms, the heterologous 4×M2e sequence(s) prophetically are inserted into either of the primary constructs.

[0689] “Heterologous sequences,” as used herein, means sequences from different species. For example, the H1 sequence is a human sequence and the H5 sequence is an avian sequence. Thus, the H1 and H5 sequences are heterologous sequences (e.g., SLLTEVETPTRNEWESRSSDSSDPLESLLTEVETPTRNEWESRSSDSSDPESSLLT EVETPTRNEWESRSSDSSDPGSSLLTEVETPTRNEWESRSSDSSDP (SEQ ID NO: 597), encoded by

(SEQ ID NO: 598)

tctctgctgactgaagtagaaactccaacgcgtaatgaatgggaatcccg
ttctagcgactcctctgatcctctcgagtccctgctgacggaggttgaaa
ccccgacccgcaacgagtgggaaagccgttcctccgattcctctgatccg
gagagcagcctgctgaccgaggtagaaaccccgacccgtaatgagtggga
atctcgctcctctgattcttctgacccgggatcctctctgctgaccgaag
tggagactccgactcgcaacgaatgggagagccgttcttctgactcctct
gacccg.

[0690] Primary constructs comprise at least one pathogen-associated molecular pattern (e.g., STF2, STF2Δ) and at least a portion of at least one integral membrane protein (e.g., M2e, such as SEQ ID NOS: 510 and 544). If there is more than one integral membrane in a primary construct, the integral membrane proteins are from the same species.

[0691] A heterologous construct includes at least two integral membrane proteins such as H1 (human) and H5 (avian), for example, in SEQ ID NOS: 583 and 584.

[0692] To generate pMT/STF2Δ, the hyper-variable region that spans amino acids 170 to 415 of the full-length flagellin gene of SEQ ID NO: 499 was deleted and replaced with a short (10 amino acid) flexible linker (GAPVDPASPW, SEQ ID NO: 594) designed to facilitate interactions of the amino and carboxy terminal sequences necessary for TLR5 signaling. The protein expressed from this construct retains potent TLR5 activity whether expressed alone or in fusion with test antigen. Thus, a second series of M2e constructs prophetically is generated based on pMT/STF2Δ. Drosophila Dmel-2 cells (Invitrogen Corporation, Carlsbad, Calif.) grown at room temperature in Schneider's medium supplemented with 10% FBS and antibiotics prophetically is transfected with the constructs described above using Cellfectin reagent (Invitrogen) according to the manufacturer's instructions. Twenty-four hours post transfection, cells prophetically is induced with 0.5 mM CuSO₄ in medium lacking FBS and incubated for an additional 48 hours. Conditioned media (CM) prophetically is harvested from induced cultures and screened for protein expression by SDS-PAGE and Western blot analyses using anti-flagellin and anti-M2e specific antibodies. The identity, TLR bioactivity of the fusion protein, antigenicity assessed by ELISA and in vivo mouse studies for immunogenicity prophetically is performed.

### Example 17

### Construction and Expression of Flagellin-Hemaglutinin (HA) Constructs

[0693] The gene encoding HA from genomic DNA from the in-house laboratory strain PR8, an attenuated derivative of A/Puerto Rico/8/34 was isolated (SEQ ID NO: 565, encoding SEQ ID NO: 564). The gene was fused to the STF2Δ cassette that has been previously constructed in pPICZΔ generating STF2Δ.HAPR8 (SEQ ID NO: 560, encoding SEQ ID NO: 559) (See FIG. 42). Purified recombinant protein was tested for immunogenicity and efficacy in BALB/c mice. The gene encoding H5N1 of the A/Vietnam/1203/04 strain was custom synthesized and fused to STF2Δ cassette generating STF2Δ.HAH5 (SEQ ID NO: 558, encoding SEQ ID NO: 557). Both human and avian HA constructs were transformed into Pichia pastoris strains GS115 and X-33 (Invitrogen Corporation, Carlsbad, Calif.). Selected clones were screened for expression by fractionation on SDS-PAGE gel and staining by Coommassie Blue and Western blot analysis using anti-HA and anti-flagellin antibodies.

### Example 18

### Generation of a Pam3Cys Fusion Protein

[0694] M2e (SEQ ID NO: 544) was chemically coupled to a tri-palmitoylcysteine (Pam3Cys) moiety through the amino terminal serine residue of the peptide. The structure of the fusion protein (Pam3Cys.M2e) is shown in FIG. 39. The chemical name for Pam3Cys.M2e is [Palmitoyl-Cys((RS)-2,3-di(palmitoyloxy)-propyl)-Ser-Leu-Leu-Thr-Glu-Val-Glu-Thr-Pro-Ile-Arg-Asn-Glu-Trp-Gly-Ser-Arg-Ser-Asn-Asp-Ser-Ser-Asp-Pro-OH acetate salt]. The molecular mass of Pam3Cys.M2e is 3582.3 daltons.

[0695] Pam3Cys.M2e was synthesized using a solid phase peptide synthesis methodology based on a well established Fmoc-strategy (Houben-Weyl, 2004. Synthesis of peptides and peptidomimetics, Vol. 22, Georg Thieme Verlag Stuttgart, N.Y.). The synthetic scheme and manufacturing process for Pam3Cys.M2e is diagrammed in the flow chart below. The Pam3Cys.M2e is a fusion protein (chemically linked) and is also referred to herein as a “lipidated peptide.”

[0696] The first step in the synthesis included solid phase peptide synthesis. The amino acid sequence of Pam3Cys.M2e was assembled on an H-Pro-2-chlorotrityl chloride resin by solid phase peptide synthesis. This resin is highly suitable for the formation of peptides with the Fmoc-strategy. The peptide chain was elongated by successive coupling of the amino acid derivatives. Each coupling step was preceded by an Fmoc-deprotection step and both steps were accompanied by repeated washing of the resin. After coupling of the last amino acid derivative, the final Fmoc-deprotection step was performed. Finally, the peptide resin washed and dried under reduced pressure. During solid phase peptide synthesis color indicator tests were performed for each step to monitor the completion of the Fmoc-cleavage and the subsequent coupling of the amino acid derivatives.

[0697] Stage 2 of the synthesis included coupling of Pam3Cys-OH. Pam3Cys-OH was pre-activated with N,N′-dicyclohexyl-carbodiimide (DCCI) in the presence of 1-hydroxybenzotriazole (HOBt). The resulting solution was filtered and added to the peptide resin. At the end of the reaction time the peptide resin washed and dried under reduced pressure. Color indicator tests were performed to control the coupling of Pam3Cys-OH.

[0698] Stage 3 of the synthesis included cleavage from the resin including cleavage of the side chain protecting groups. The peptide resin was treated with trifluoroacetic acid (TFA). The product was precipitated from the reaction mixture and lyophilized.

[0699] Stage 4 of the synthesis included purification by preparative reverse phase HPLC. The crude material obtained from Stage 3 was purified by preparative HPLC on a reverse phase column using a TFA system. The fractions were collected, checked by analytical HPLC and pooled accordingly. Pooled fractions from the TFA runs were lyophilized.

[0700] Stage 5 of the synthesis included precipitation in the presence of EDTA. The purified material from Stage 4 was precipitated from an aqueous solution of EDTA. The product was filtered off and dried under reduced pressure.

[0701] Stage 6 of the synthesis included ion exchange chromatography. The last stage of manufacturing Pam3Cys.M2e was the exchange from the trifluoroacetate salt into the acetate salt by ion exchange. The material from Stage 5 was loaded onto an ion exchange column and eluted with acetic acid. Fractions were checked by thin layer chromatography and the combined product-containing fractions were filtered and lyophilized to yield the final product.

[chemical structure]

[0702] The purity specification for the Pam3Cys.M2e drug substance was >80% by RP-HPLC. The specification was based on the purity achieved with three non-GMP lots of Pam3Cys.M2e made from the same GMP batch of M2e-peptide intermediate resin. The purity of the three non-GMP lots of Pam3Cys.M2e was 80.2%, 80.3% and 80.8%, for lots D.001.Pam3Cys.M2e, D.002.Pam3Cys.M2e and D.003.Pam3Cys.M2e, respectively.

### Example 19

### Immunogenicity

Materials and methods

Synthesis and Purification of PAM3Cys.M2e

[0703] Pam3Cys.M2e was prepared by Genemed Synthesis and Bachem using solid phase synthesis methodologies and FMOC chemistry as described above. Mass spectroscopy analysis was used to verify the molecular weight of the final product.

Endotoxin Assay

[0704] Endotoxin levels of the STF2.4×M2e and the Pam3Cys.M2e were measured using the QCL-1000 Quantitative Chromogenic LAL test kit (BioWhittaker #50-648U), following the manufacturer's instructions for the microplate method.

TLR5 Bioactivity Assay

[0705] HEK293 cells constitutively express TLR5 and secrete several soluble factors, including IL-8, in response to TLR5 signaling. HEK293 cells were seeded in 96-well microplates (50,000 cells/well) and test proteins were added and incubated overnight. The next day, the conditioned medium was harvested, transferred to a clean 96-well microplate and frozen at −20° C. After thawing, the conditioned medium was assayed for the presence of IL-8 in a sandwich ELISA using an anti-human IL-8 matched antibody pair (Pierce, #M801E and #M802B) following the manufacturer's instructions. Optical density was measured using a microplate spectrophotometer (FARCyte, Amersham). Results are reported as pg of IL8 per ml as determined by inclusion of a standard curve for IL8 in the assay.

TLR2 Bioactivity Assay

[0706] RAW264.7 cells (ATCC) express TLR2 and secrete several soluble factors, including TNFα, in response to TLR2 signaling. RAW264.7 cells were seeded in 96-well microplates (50,000 cells/well), test compounds were added and incubated overnight. The next day, the conditioned medium was harvested, transferred to a clean 96-well microplate and frozen at −20° C. After thawing, the conditioned medium was assayed for the presence of TNFα in a sandwich ELISA using an anti-mouse TNFα matched antibody pair (Pierce) following the manufacturer's instructions. Optical density was measured using a microplate spectrophotometer (FARCyte, Amersham). Results are reported as ng of TNF per ml as determined by reference to a standard curve for TNF included in the assay.

Mouse Immunogenicity

[0707] Female BALB/c mice (National Cancer Institute) were used at the age of about 6-8 weeks. Mice were divided into groups of 5 to 10 mice per group, and immunized subcutaneously on each side of the base of the tail on days 0 and 21 with the indicated concentrations of STF2.4×M2e or Pam3Cys.M2e fusion protein. On days 10 (primary) and 28 (boost), individual mice were bled by retro-orbital puncture. Sera were harvested by clotting and centrifugation of the heparin-free blood samples.

Mouse Serum Antibody Determination

[0708] M2e-specific IgG levels were determined by ELISA. 96-well ELISA plates were coated overnight at 4° C. with 100 μl/well of a 5 μg/ml solution of the M2e peptide in PBS. Plates were blocked with 200 μl/well of Assay Diluent Buffer (ADB; BD Pharmingen) for one hour at room temperature. The plates were washed three times in PBS containing 0.05% Tween-20 (PBS-T). Dilutions of the sera in ADB were added (100 μl/well) and the plates were incubated overnight at 4° C. The plates were washed three times with PBS-T. Horse radish peroxidase, or HRP-labeled goat anti-mouse IgG antibodies (Jackson Immunochemical) diluted in ADB were added (100 μl/well) and the plates were incubated at room temperature for 1 hour. The plates were washed three times with PBS-T. After adding TMB Ultra substrate (3,3′,5,5′-tetramentylbenzidine; Pierce) and monitoring color development, the O.D. 450 was measured on a Tecan Farcyte microspectrophotometer.

Rabbit Immunogenicity

[0709] Female and male NZW rabbits (Covance Research Products) were used at the age of about 13-17 weeks. Rabbits were divided into groups of 3 male and 3 female per group, and immunized i.m. on alternating thighs on days 0 and 21 and 42 with the indicated concentrations of Pam3Cys.M2e peptide or STF2.4×M2e fusion protein. Animals were bled on day −1 (prebleed), 14 (primary) and 28 and 42 (boost). Sera were prepared by clotting and centrifugation of samples.

Rabbit Serum Antibody Determination

[0710] M2e-specific IgG levels were determined by ELISA. 96-well ELISA plates were coated overnight at about 4° C. with 100 μl/well M2e peptide in PBS (5 μg/ml). Plates were blocked with 200 μl/well of Assay Diluent Buffer (ADB; BD Pharmingen) for one hour at room temperature. The plates were washed three times in PBS-T. Dilutions of the sera in ADB were added (100 μl/well) and the plates were incubated overnight at about 4° C. The plates were washed 3× with PBS-T. Bound IgG was detected using HRP-conjugated goat anti-rabbit IgG (Jackson Immunochemical). The plates were washed three times with PBS-T. After adding TMB Ultra substrate (Pierce) and monitoring color development, O.D. 450 was measured on a Molecular Devices Spectramax microspectrophotometer. Results are reported as the Delta O.D. which is determined by subtracting the O.D. 450 reading for the prebleed of each animal from the O.D. 450 for each animal post-immunization.

BALB/C Mouse Efficacy Model

[0711] In a typical experiment, about 5-6 week old female BALB/c mice (10-20 per group) were obtained and allowed to acclimate for one week. Fusion proteins formulated in PBS or other suitable formulation were administered by s.c. injection. Mice were immunized on days 0 and 14. On day 21, sera was harvested by retro-orbital puncture and evaluated for M2e specific IgG by ELISA. Mice were challenged by intranasal administration of 1×LD90 of the well characterized mouse adapted Influenza A strain, A/Puerto Rico/8/34 (H1N1). Mice were monitored daily for 14 days for survival and weight loss. Mice that lost about 30% of their initial body weight were humanely sacrificed, and the day of sacrifice recorded as the day of death. Efficacy data were reported as survival times.

Results

In Vitro Bioactivity

[0712] These assays were based on cell lines expressing the relevant TLR and screened for the ability to produce either IL8 or TNF-α in response to TLR triggering. In FIG. 52, the ability of STF2.4×M2e (▪) or STF2.OVA (◯) to stimulate TLR5 dependent IL8 production was evaluated following the stimulation of TLR5 positive, HEK293 cells. The results indicate that both fusion proteins stimulated IL8 production in a dose dependent manner and that the activity of the PAMP was retained in the context of the fusion.

[0713] TLR2 activity was similarly evaluated for Pam3Cys.M2e following stimulation of TLR2 positive RAW264.7 cells. In FIG. 51, the experimental groups are: the known endotoxin, LPS, as a positive control (♦), LPS plus the inhibitor of endotoxin polymixin B (PMB) as a negative control (◯), free Pam3Cys as a positive control for TLR2 signalling (▪), free Pam3Cys plus PMB (□), Pam3Cys.M2e (♦) and Pam3Cys.M2e plus PMB (⋄). The results showed similar activity profiles for Pam3Cys.M2e and the free TLR2 ligand Pam3Cys. The addition of polymyxin B (PMB) did not reduce its activity, indicating that there is no or low endotoxin contamination.

Physical Linkage of PAMP and Antigen Enhances Immunogenicity

[0714] Using mouse models of immunogenicity, chemical coupling of Pam3Cys to M2e enhances the immunogenicity of the M2e antigen as compared to either the M2e peptide delivered alone or the M2e peptide co-delivered with free Pam3Cys. In the experiment shown in FIG. 52, groups of mice were immunized on days 0 and 21 with PBS as a negative control (*), the free TLR2 ligand, Pam3CSK-4 (( ), M2e peptide alone (∘), free Pam3CSK-4 mixed with M2e peptide (□), or the fusion of Pam3Cys and M2e referred to as Pam3.M2e (♦). The relevant the molar ratio of M2e peptide delivered was held constant. On day 28, sera were harvested and analyzed for M2e-specific antibody titers by ELISA. The results show that chemical coupling of Pam3Cys to the M2e (Pam3Cys.M2e) generates a detectable serum antibody response to the M2e antigen.

[0715] Physical linkage between the TLR5 ligand STF2 and antigen was demonstrated using the model antigen ovalbumin (OVA). Mice received a single s.c. immunization with STF2, OVA, STF2.OVA fusion protein, STF2+OVA mixture or PBS alone. Dosages were calculated to deliver 12 μg equivalents of STF2 and OVA per group. Seven days later, sera were harvested and OVA-specific antibodies were examined by ELISA. Data shown in FIG. 53 depict IgG1 titers at a 1:100 dilution of the sera. These results demonstrate that physical linkage of the TLR5 ligand and antigen results in optimal immunogenicity in vivo.

PAMP Linked Antigens are More Immunogenic than Conventional Adjuvant

[0716] Groups of 5 BALB/c mice were immunized on day 0 and 14 with 30 μg of Pam3Cys.M2e (♦), 22.5 μg of M2e which is the molar equivalent of M2e in 30 μg of Pam3Cys.M2e (⋄), 22.5 mg of M2e adsorbed to the conventional adjuvant Alum (□), or 25 mg of the recombinant protein STF2.4×M2e (▪). A group receiving PBS was included as a negative control (∘). Sera were harvested 7 days post the second dose and M2e specific IgG were evaluated by ELISA. The results shown in FIG. 54 indicate that M2e alone is poorly immunogenic in that it failed to elicit antibody titers above background. The conventional adjuvant Alum provided a modest enhancement in the immune response to M2e. The PAMP linked M2e constructs; however, provided the greatest enhancement in immunogenicity. These results indicate direct linkage of PAMPs with portions of an integral membrane protein of an influenza viral protein can elicit immune responses that are more potent than those elicited by the conventional adjuvant Alum.

Dose and Immunogenicity

[0717] Dose ranging studies were carried out to further assess the potency of Pam3Cys.M2e and STF2.4×M2e. For STF2.4×M2e, BALB/c mice were immunized on day 0 and 14 with dilutions of STF2.4×M2e that ranged from 0.25 to 25 μg of STF2.4×M2e per immunization. The prefix D002 refers to the specific batch of STF2.4×M2e used in this experiment, while R-028 refers to a historical reference batch of STF2.4×M2e used in this experiment. Seven days following the last immunization (Day 21) mice were bled and M2e-specific IgG responses were evaluated by ELISA. The results shown in FIG. 55 demonstrate that immunization with doses as low as 0.25 μg per immunization of STF2.4×M2e induced detectable levels of M2e-specific IgG, with the optimal dose in mice falling in the range of about 2.5 to about 25 μg.

[0718] For Pam3Cys.M2e, BALB/c mice were immunized on day 0 and 14 with 0.05 to 30 μg of Pam3Cys.M2e per immunization. Seven days following the last immunization (Day 21) mice were bled and M2e-specific IgG responses were evaluated by ELISA. The results shown in FIG. 56 demonstrate that immunization with concentrations as low as 0.05 μg of Pam3Cys.M2e induced detectable levels of M2e-specific IgG, with the optimal dose for mice in this study of about 30 μg.

Immunogenicity In Multiple Mouse Strains

[0719] The immunogenicity of Pam3Cys.M2e was evaluated in multiple mouse strains including BALB/c (●), C57BL/6 (▪), CB6/F1 (♦), DBA/2 (▴), Cr:NIH (Swiss) (X) and C3H/HeN (*). Groups of five for each strain were immunized on day 0 and 14 with 30 μg of Pam3Cys.M2e per immunization. Sera were harvested on day 21 and levels of M2e-specific IgG evaluated by ELISA. All strains exhibited significant levels of M2e-specific IgG indicating that the immunogenicity of Pam3Cys.M2e is not dependent on a particular MHC (FIG. 57).

Immunogenicity in Rabbits

[0720] Studies aimed at evaluating the immunogenicity of Pam3Cys.M2e and STF2.4×M2e in a second species, rabbit, were carried out. In the first study, rabbits (3 females and 3 males/group) were immunized with 500, 150, 50, 15 or 5 μg (i.m.) of Pam3Cys.M2e on day 0, 21 and 42. As a control, an additional group received the formulation buffer F111 (10 mM Tris, 10 mM histidine, 75 mM NaCl, 5% sucrose, 0.02% Polysorbate-80, 0.1 mM EDTA, 0.5% ethanol, 20 mg/mL hydroxypropyl-beta-cyclodextrin, pH 7.2). On day 7 post-boost 2, peripheral blood was obtained and the anti-M2e antibody titers were evaluated by ELISA. The results shown in FIG. 58 depict the individual rabbit antibody titers at a 1:125 dilution of the sera. The data suggest a dose-response relationship between the amount of Pam3Cys.M2e used for prime/boost vaccinations and the level of the antibody titer achieved.

[0721] In the second study, rabbits (3 females and 3 males/group) were immunized with 500, 150, 50, 15 or 5 μg (i.m.) of STF2.4×M2e. As a control, an additional group received saline alone. On day 14 post-immunization, peripheral blood was obtained and the anti-M2e antibody titers were evaluated by ELISA. Notably, significant M2e-specific IgG responses were detectable by day 14 post-prime in all animals immunized (FIG. 59). The results indicate that STF2.4×M2e elicits a rapid and consistent immune response in rabbits.

Efficacy in the Mouse Challenge Model

[0722] The efficacy of the Pam3Cys.M2e and STF2.4×M2e was evaluated in BALB/c mice using the well characterized mouse adapted strain, Influenza A/Puerto Rico/8/34 (PR/8) as the challenge virus. Groups of ten mice were immunized s.c. on day 0 and 14 with 30 μg of Pam3Cys.M2e in the formulation buffer F111 (▪), 30 μg of Pam3Cys.M2e in the proprietary buffer F120 (10 mM Tris, 10 mM histidine, 10% sucrose, 0.02% Polysorbate-80, 0.1 mM EDTA, 0.5% ethanol, 0.075% docusate sodium, pH 7.2) (▴), 30 μg of Pam3Cys.M2e in the buffer F119 (10 mM Tris, 10 mM histidine, 75 mM NaCl, 5% sucrose, 0.02% Polysorbate-80, 0.1 mM EDTA, 0.5% ethanol, 0.1% docusate sodium, pH 7.2), 30 μg of STF2.4×M2e in the buffer F105 (10 mM Tris, 10 mM histidine, 75 mM NaCl, 5% sucrose, 0.02% Polysorbate-80, 0.1 mM EDTA, 0.5% ethanol, pH 7.2), 3 μg of STF2.4×M2e in buffer F105 (10 mM Tris, 10 mM histidine, 75 mM NaCl, 5% sucrose, 0.02% Polysorbate-80, 0.1 mM EDTA, 0.5% ethanol, pH 7.2) (●) or 0.3 μg of STF2.4×M2e in buffer F105 (□). A group receiving PBS alone was included as a negative control (∘), and a convalescent group with immunity to PR/8 following a sublethal challenge with the virus was included as a positive control (⋄). On day 28, animals were challenge with an LD90 of the PR/8 challenge stock. Weight loss and survival was followed for 14 days post challenge (FIG. 60).

[0723] Animals in the convalescent group which had successfully cleared an earlier non-lethal infection with PR/8 demonstrated 100% protection to a subsequent viral challenge. Animals receiving the PBS buffer alone exhibited morbidity beginning on days 7 and 8, with 80% lethality occurring by day 10, while animals immunized with 30 μg of Pam3Cys.M2e in F111 demonstrated enhanced survival, with 50% of mice surviving the challenge. Animals receiving Pam3Cys.M2e in F119 exhibited morbidity beginning on days 8 and 9 with 80% of the mice surviving. Animals receiving Pam3Cys.M2e in buffer F120 (10 mM Tris, 10 mM histidine, 10% sucrose, 0.02% Polysorbate-80, 0.1 mM EDTA, 0.5% ethanol, 0.075% docusate sodium, pH 7.2) or the STF2.4×M2e protein exhibited the mildest disease course with 90 to 100% of the mice in these groups surviving the lethal challenge. These results demonstrate that both Pam3Cys.M2e and STF2.4×M2e can confer protective immunity to a challenge with influenza A in vivo.

Discussion

[0724] Salmonella typhimurium flagellin (fljB) is a ligand for TLR5. A recombinant protein consisting of full-length flijB (STF2) fused to four tandem repeats of M2e was expressed in E. coli and purified to >95% purity with low endotoxin levels. In reporter cell lines, this protein (STF2.4×M2e) triggered IL8 production in a TLR5-dependent fashion. Mice immunized with dilutions of STF2.4×M2e that ranged from 0.25 μg to 25 μg, formulated in the buffer F105 which is without a conventional adjuvant or carrier, mounted a vigorous antibody response. The potency of the recombinant protein was further demonstrated in rabbit immunogenicity studies where animals receiving as little as 5 μg of protein seroconverted after a single dose. The efficacy of the PAMP fusion protein was demonstrated in the mouse challenge model using Influenza A/Puerto Rico/8/34 as the challenge virus. Mice immunized with as little as about 0.3 μg of the protein per dose exhibited mild morbidity with 100% of the mice surviving the challenge.

[0725] Synthetic tripalmitoylated peptides mimic the acylated amino terminus of lipidated bacterial proteins and are potent activators of TLR2. In these studies, a tripalmitoylated peptide consisting of three fatty acid chains linked to a cysteine residue and the amino terminus of the Influenza A M2 ectodomain (M2e) was synthesized using standard solid-phase peptide chemistries. This peptide (Pam3Cys.M2e) triggered TNFα production in a TLR2-dependent fashion in reporter cell lines. When used to immunize mice without adjuvant, Pam3Cys.M2e generated an antibody response that was more potent than M2e when mixed with free Pam3CSK-4. Pam3Cys.M2e was also found to be immunogenic in rabbits where a dose response relationship was observed between the amount of Pam3Cys.M2e used for immunization and the antibody titer achieved. The efficacy of the Pam3Cys.M2e peptide in a number of different formulations was evaluated in the mouse challenge model using Influenza A/Puerto Rico/8/34 as the challenge virus. Pam3Cys.M2e formulated in F119 and F120 exhibited the mildest morbidity with about 80 to about 100% of the mice surviving the challenge.

### Example 20

### Materials and Methods

PCR Amplification and DNA Primers

[0726] All PCR amplifications were performed using Pfu Ultra Hotstart PCR Master Mix (Catalog number 600630) from Stratagene (La Jolla, Calif.) according to the manufacturer's recommendations. DNA primers were purchased from Sigma Genosys and are described below.

STF28BGF-1:

(SEQ ID NO: 644)

CTCGGGAGATCTGCACAAGTAATCAACACTAACAGTCT
STF28MCR-1:

(SEQ ID NO: 645)

CCATGGGCTAGCAGGATCCACCGGCGCTCCCTGCACGTTCA
STF28MCF-2:

(SEQ ID NO: 646)

GGAGCGCCGGTGGATCCTGCTAGCCCATGGACCGAAAACCCG
STF28ECR-2:

(SEQ ID NO: 647)

TCTGCAGAATTCACGTAACAGAGACAGCACGTTCTGCGGGACGTCCCGCA
GAACGTGCTGTCTCTGTTACGTGAATTCTGCAGA
pET24AR:5

(SEQ ID NO: 648)

TCCGGCGTAGAGGATCGAGA
STF2-E3R3:

(SEQ ID NO: 649)

CAATTGACCTTCAAGCTTCGAATTGCCCTTACGTAACAGAGACAGCACGT
TCTG
AX-E3F3:

(SEQ ID NO: 650)

AAGCTTGAAGGTCAATTGGAATTCCCTAGGACTAGTATGGAAAAATTGCA
GTTGAAG
pET24AF:

(SEQ ID NO: 651)

GCTTAATGCGCCGCTACAGG
5′WNE28:

(SEQ ID NO: 652)

GCGGCCGCTCATGGAAAAATTGCAGTTGAAGGGAACAACC
3′WNE28:

(SEQ ID NO: 653)

CCGCGGTTTGCCAATGCTGCTTCCAGACTTGT
NdeI-STF2:

(SEQ ID NO: 654)

CCGGCATGCCATATGGCACAAGTAATCAACACTAACAGTCTGTCGCTGC
BlpI-EdIII:

(SEQ ID NO: 656)

GCATGCTCAGCTTATTAAGGGTTTGCCAATGCTGCTTCCCAGACTTGTG
JE EIII primer:

(SEQ ID NO: 53)

TACGTGAATTCAGCAGATATCCAGCAC

Cloning of pET/STF2Δ.EIII

[0727] Full length flagellin of Salmonella typhimurium fljb (flagellin phase 2) (also referred to herein as “STF2”) is encoded by a 1.5 kb gene. A truncated version of the STF2 (STF2Δ, SEQ ID NO: 606, encoded by SEQ ID NO: 607) was generated by deleting the hyper-variable region that spans amino acids 170 to 415 of SEQ ID NO: 604. The deleted region was replaced with a short flexible linker (GAPVDPASPW, SEQ ID NO: 659) designed to facilitate interactions of the NH2 and COOH termini sequences necessary for TLR5 signaling. To generate this construct, a two-step PCR was used. In the first reaction, STF2.OVA (SEQ ID NO: 755 encoding amino acid sequence SEQ ID NO: 756) served as the DNA template and STF28BGF-1 and STF28MCR-1 were used as primer pairs. In a separate reaction, the same DNA template was combined with primers STF28MCF-2 and STF28ECR-2.

[0728] The PCR amplification reactions generated about 500 bp and about 270 bp fragments, respectively. These PCR products were combined in a final PCR reaction using STF28BGF-1 and STF28ECR-2 as primers. The amplified DNA product from this reaction (about 0.77 kb) was digested with BglII and EcoRI restriction enzymes and ligated into pMTBiP/V5-His B (Invitrogen, Carlsbad, Calif.) that had previously been digested with BglII and EcoRI and treated with alkaline phosphatase. An aliquot of the ligation mix was used to transform TOP10 cells (InVitrogen, Carlsbad, Calif.). PCR screening was performed using vector specific primers, pMTFOR (methionine promoter) (CATCTCAGTGCAACTAAA, SEQ ID NO: 759) and BGHREV (bovine growth hormone poly A) (TAGAAGGCACAGTCGAGG, SEQ ID NO: 760), to identify several positive clones. All positive clones were further analyzed by restriction mapping analysis and confirmed by DNA sequencing. The resultant construct pMT/STF2Δ was used to generate pMT/STF2Δ.EIII+.

[0729] The domain III of the West Nile virus envelope protein of pET/STF2Δ.EIII+ (SEQ ID NOS: 673, 674) was derived from the Drosophila expression plasmid pMT/STF2.E. This plasmid contains full-length STF2 (amino acids 1-506, SEQ ID NO: 604) fused to the West Nile Virus envelope protein (amino acids 1-406, SEQ ID NO: 642). The pMT/STF2.E (SEQ ID NO: 761) clone AX-1 was used as a DNA template and 5′WNE28 (SEQ ID NO: 652) and 3′WNE28 (SEQ ID NO: 653) served as primers for PCR amplification. In order to facilitate restriction analysis and subsequent cloning steps, the 5′ primer encoded a novel NotI site (New England Biolabs, Beverly, Mass.) and the 3′ primer contained a unique SacII site. The amplified EIII+DNA fragment (345 bp; SEQ ID NO: 781 that encodes amino acids 292-406 of SEQ ID NO: 642) was subcloned into pCR-Blunt II-TOPO cloning vector (InVitrogen, Carlsbad, Calif.) to generate plasmid TOPOEIII. A stop codon was subsequently introduced downstream of the EIII+ sequence by blunting the SacII and SpeI restriction sites using T4 DNA polymerase.

[0730] To generate pMT/STF2Δ.EIII+ (SEQ ID NOS: 673, 674), the EIII+ fragment was isolated from TOPOEIII+ using NotI and BamHI restriction sites and ligated into the NotI and SacII restriction sites in pMT/STF2Δ. The BamHI site of the EIII+DNA fragment and the SacII site of pMTSTF2Δ were blunted with T4 DNA polymerase prior to ligation. The STF2Δ.EIII+ sequence (SEQ ID NOS: 673, 674) from pMT/STF2Δ.EII+ was isolated by PCR amplification using the primers NdeI-STF2 and BlpI-EdIII. To generate pET/STF2Δ.EIII+ (SEQ ID NO: 674), the PCR product was digested with NdeI and BlpI and ligated into pET24a plasmid that had been predigested with NdeI and BlpI. The ligation mix was transformed into Mach-1 cells (InVitrogen, Carlsbad, Calif.) and the cells were grown on LB supplemented with 50 μg/ml kanamycin. Several colonies were screened by restriction mapping and were verified by DNA sequencing.

Cloning of pET/STF2.EIII+

[0731] The West Nile virus EIII+ sequence of pET/STF2.EIII+ (SEQ ID NOS: 657, 658) was derived from pETSTF2.E (SEQ ID NOS: 761, 762). This E. coli expression plasmid contains full-length STF2 (amino acids 1-506) fused to the West Nile Virus envelope protein (amino acids 292-406 of SEQ ID NO: 642, which is SEQ ID NO: 610). In two independent PCR reactions, pET/STF2.E was used as the DNA template. One reaction used the primers pET24AR:5 (SEQ ID NO: 648) and STF2-E3R3: (SEQ ID NO: 649) and the other used AX-E3F3 (SEQ ID NO: 650) and pET24AF (SEQ ID NO: 651). These PCR reactions generated a 1.5 kb fragment that consisted of full-length STF2 and a 340 bp fragment that comprised the EIII domain plus additional amino acids that extended into domain I of the envelope protein. Aliquots of these PCR amplification reactions were combined, and the two products served as templates for a PCR reaction with the external primers pET24AR (SEQ ID NO: 648) and pET24AF (SEQ ID NO: 651). This resulted in the generation of about a 1.8 kb DNA fragment that fused EIII+ sequence (SEQ ID NO: 781, a nucleic acid sequence encoding amino acids 292-406 of SEQ ID NO: 642, which is SEQ ID NO: 610) to STF2. The PCR product was digested with NdeI and BlpI and gel purified and ligated by compatible ends to a pET24a vector that had previously been digested with compatible enzymes and de-phosphorylated. The ligation mix was transformed into Mach-1 cells (InVitrogen, Carlsbad, Calif.) as described for pET/STF2Δ.EIII+. Several colonies were screened by restriction mapping and two clones were verified by DNA sequencing.

Cloning of pET/STF2Δ.JEIII+

[0732] A portion of the envelope protein of a Japanese encephalitis virus (JEV) (strain SA-14-14-2 (Jai, L., et al., Chin Med J (Eng) 116:941-943 (2003)); currently employed in a JEV vaccine encoded by domain III was custom synthesized by DNA 2. Inc (Menlo Park, Calif.). The portion of domain III was excised from the pJ2:G01510 using NotI and Blp I site that flank the insert. The DNA insert was gel isolated and cloned by compatible ends to pET24A/STF2Δ.EIII+ (SEQ ID NOS: 673, 674) that had previously been digested with the appropriate enzymes to release the West Nile virus EIII+ insert. The deleted vector was then gel purified and ligated to an aliquot of JE EIII+. The ligation mix was used to transform TOP-10 cells (InVitrogen, Carlsbad, Calif.) and the cells were grown on LB supplemented with 50 μg/ml kanamycin. Several colonies were screened by restriction mapping and were verified by DNA sequencing.

[0733] The resulting construct, pET24A/STF2Δ.JEIII (SEQ ID NOS: 608, 609) was BLR (DE3) strain (Novagen) and expression was monitored in several clones using Commassie Blue staining which was confirmed by Western blot using anti-flagellin antibodies. Using, pET24A/STF2Δ.JEIII+ as the DNA template and the JE EIII+ oligonucleotide as primer (SEQ ID NO: 656) the cysteine residue in the linker region between STF2Δ and JEIII+ was changed to a serine residue using QuikChange Site Directed Mutagenesis Kit (Stratagene, LaJolla, Calif.) according to the manaufacturer's instructions. The clone was verified by sequencing and assayed for expression as described for pET24A/STF2Δ.JEIII+ above.

[0734] When a cysteine residue in a linker in change to a serine residue the fusion protein in also referred to herein by inclusion of an “s” in the designation of the fusion protein. For example, “STF2Δ.EIII+” includes a cysteine residue in the linker (SEQ ID NO: 674), whereas “STF2Δ.EIIIs+” include a serine residue substituted for the cysteine residue in the linker (SEQ ID NO: 675).

Cloning the EIII Domain of Each Dengue Virus Fused to the C-Terminal End of Flagellin (STF2Δ)

[0735] Initially, obtaining biologically active material from the fusion of the entire envelope protein of West Nile virus was difficult, perhaps due to the presence of multiple cysteines residues (12 cysteines) in the envelope protein (see SEQ ID NO: 642). However, when the region encoding domain III (EIII) of the protein was sub-cloned, the fusion protein was abundantly expressed in E. coli and was highly efficacious in mice. Although there is an overall sequence dissimilarity among the 4 distinct DEN viruses (Den1, Den2, Den3, Den4, SEQ ID NOS: 763-770, the three-dimensional structures within domain III of the envelope protein are similar among the flaviviruses. This domain in DEN and other flaviviruses encodes the majority of the type-specific contiguous critical/dominant neutralizing epitopes. Domain III of the dengue viruses (Den1, Den2, Den3 and Den4) has been expressed, in bacteria and shown to be immunogenic, capable of inducing neutralizing antibodies in experimental animals (Simmons, M., et al., Am. J. Trop. Med Hyg 65:159 (2001)). Domain III corresponding to residues about 295 to about 399 (exact numbering depends on the particular DEN virus, for example, of SEQ ID NOS: 763, 765, 767, 769) of the four different DEN viruses have been codon-optimized for expression in E. coli. The synthetic gene was amplified by using PCR and sub-cloned into the NotI site of the vector pET/STF2Δ generating pET/STF2Δ.DEN1EIII, pET/STF2Δ.DEN2EIII, pET/STF2Δ.DEN3EIII and pET/STF2Δ.DEN4EIII (SEQ ID NOS: 683, 685, 687 and 689).

E. coli Production of STF2.EIII+, STF2Δ.EIII+, STF2Δ.EIIIs+ and STF2Δ.JEIII+

[0736] Cell cultures (6 L) of BLR(DE3) pLysS that harbor pETSTF2.EIII+ (SEQ ID NOS: 657, 658), pETSTF2Δ.EIII+ (SEQ ID NOS: 673, 674), pETSTF2Δ.EIIIs+ (SEQ ID NOS: 675, 676) or pETSTF2Δ.JEIII+ SEQ ID NOS: 608, 609) were grown in LB medium containing 15 μg/ml kanamycin, 12.5 μg/ml tetracycline and 24 μg/ml chloramphenicol. At an OD₆₀₀ of about 0.6 protein expression was induced with 1 mM IPTG for about 3 h at about 37° C. Following induction, cells were harvested by centrifugation (7000 rpm×7 minutes in a Sorvall RC5C centrifuge) and resuspended in 2×PBS, 1% glycerol, DNAse, 1 mM PMSF, protease inhibitor cocktail and 1 mg/ml lysozyme. The suspension was passed through a microfluidizer to lyse the cells and the lysate was centrifuged (45,000 g for one hour in a Beckman Optima L ultracentrifuge) to separate the soluble fraction from inclusion bodies. Under these growth and induction conditions, STF2.EIII+ was expressed as a soluble protein and STF2Δ.EIII+ (SEQ ID NOS: 673, 674), STF2Δ.EIIIs+ (SEQ ID NOS: 675, 676) and STF2Δ.JEIII+ (SEQ ID NOS: 608, 609) formed inclusion bodies.

Purification of STF2.EIII+

[0737] Cell lysate containing soluble STF2.EIII+ (SEQ ID NOS: 657, 658) was applied to Sepharose Q resin (Amersham Biosciences, Piscataway, N.J.) in the presence of 0.5 M NaCl to reduce DNA, endotoxin, and other contaminants. The flow-through fraction was collected and the conductivity adjusted by a 10-fold dilution with buffer A (Buffer A: 100 mM Tris-Cl, pH 8.0). The diluted material was re-loaded onto Q Sepharose and bound protein was eluted with a linear gradient from 20% to 60% Buffer B (Buffer B: 100 mM Tris-Cl, 1 M NaCl, pH 8.0). Fractions containing STF2.EIII+ were pooled and further processed by Superdex-200 gel (SD200) filtration chromatography in the presence of Na-deoxycholate to remove residual endotoxin (running buffer: 1% Na-deoxycholate, 100 mM NaCl, 100 mM Tris-HCl, 1% glycerol, pH 8.0). Following SD200 chromatography, the eluted protein was loaded directly onto Q Sepharose and washed extensively with buffer A to remove detergent. Bound protein was again eluted with a linear gradient from 20% to 60% Buffer B. In one preparation (Batch 057), this step was substituted with a detergent removal procedure using Extract-D detergent removal gel (Pierce Biotechnology, Rockford, Ill.). The purified protein was dialyzed against buffer containing 50 mM Tris, 100 mM NaCl and 1% glycerol and stored at −80° C.

Purification of STF2Δ.EIII+

[0738] STF2Δ.EIII+ inclusion bodies were collected by low-speed centrifugation (7000 rpm×7 minutes in a Sorvall RC5C centrifuge) and solubilized with buffer containing 8 M urea, 100 mM Tris-HCl, 5 mM EDTA, pH 8.0. The urea concentration of the solubilized protein was adjusted to 1 M and the sample was loaded onto Q Sepharose. The bound protein was eluted using a linear gradient from 0% to 100% Buffer B. (Buffer A: 100 mM Tris-HCl, 5 mM EDTA, 1 M urea, pH 8.0. Buffer B: 100 mM Tris-Cl, 5 mM EDTA, 1 M NaCl, 1 M urea, pH 8.0). Due to the formation of protein aggregates following elution, the urea concentration of the Q Sepharose material was adjusted to 8 M. The protein was further purified by gel filtration chromatography using SD200. The column was pre-equilibrated with 100 mM Tris-HCl, pH 8.0, 100 mM NaCl, 1% glycerol, 8 M urea plus 1% Na-deoxycholate. The eluted protein was subjected to a second IEX chromatography step using Source Q to remove 1% Na-deoxycholate. Bound protein was eluted with a linear gradient from 20% to 60% Buffer B. (Buffer A: 100 mM Tris-Cl, pH 8.0, 8 M urea, 5 mM EDTA. Buffer B: 100 mM Tris-HCl, pH 8.0, 5 mM EDTA, 8 M urea, 1 M NaCl). Final polishing of the protein was completed by gel filtration chromatography using SD200 (Running Buffer: 100 mM Tris-HCl, pH 8.0, 8 M urea, 100 mM NaCl and 1% glycerol). Reducing agent was added to the SD200 fraction (2.5 mM DTT) and the protein was refolded by step-wise dialysis against decreasing concentrations of urea. The urea concentration was reduced sequentially against buffers that contained 100 mM Tris-HCl, pH 8.0, 100 mM NaCl, 1% glycerol and 6 M, 4 M, 2 M or no urea.

Refolding and Purification of STF2Δ.EIII+ Trimer

[0739] STF2Δ.EIII+ (SEQ ID NOS: 673, 674) from urea-solubilized inclusion bodies was efficiently refolded to form trimer product by simple dialysis as described above the trimer (3 of these STFΔ.EIII fusion proteins) was deduced based on molecular weight in SDS-PAGE. Following dialysis, endotoxin was removed by multiple extractions with Triton X-114. The trimer was purified and separated from monomer and aggregates by S200 size exclusion chromatography. The final product migrated as a single band with an apparent molecular weight of about 130 kDa on SDS-PAGE.

Refolding and Purification of STF2Δ.EIII+ Monomer

[0740] The monomeric form of STF2Δ.EIII+ (SEQ ID NOS: 673, 674) was produced consistently and efficiently by refolding using rapid dilution, which prevented individual STF2Δ.EIII+ fusion proteins from interacting with one another to form meutimers, such as trimers (supra). STF2Δ.EIII+ solubilized from inclusion bodies in 4M urea was raised to 8M urea without reductant. The protein was then rapidly diluted in Tris/NaCl/glycerol buffer, pH 8.0, to about 0.1 mg/ml and a final urea concentration of 0.1M at room temperature. The monomer was further purified and separated from aggregates by S200 size exclusion chromatography. The final product migrated as a single band with an apparent molecular weight of about 43 kDa on SDS-PAGE.

Purification of STF2Δ.EIIIs+ (Serine Substitution of the Linker between STF2Δ and EII+, SEQ ID NO: 675)

[0741] STF2Δ.EIIIs+ (SEQ ID NOS: 675, 676) from solubilized inclusion bodies was refolded using a rapid dilution method similar to that used to refold the STF2Δ.EIII+ monomer. The refolded protein was captured on a butyl sepharose column and eluted while removing most of the endotoxin contamination. Eluate from the butyl sepharose purification was concentrated and put through 4 cycles of Triton X-114 extractions to reduce endotoxin levels down to about <0.1 EU/μg before a final purification step over SD200 gel filtration. The final pooled product migrated as a single band with an apparent molecular weight of about 43 kDa on SDS-PAGE and contained a trace amount of Triton X-114 (about 0.000015%).

Purification of STF2Δ.JEIII+ (SEQ ID NOS: 608, 609)

[0742] Protein was isolated from inclusion bodies under denaturing conditions. Inclusion bodies were washed with detergent (0.5% Triton X 100) and solubilized in 8 M urea, resulting in partial purification of the target protein. For endotoxin removal, protein was applied on a Source S cation exchange column at low pH (about 3.5) and eluted with a salt gradient (0 to about 1 M NaCl). The protein was refolded using rapid dilution as described for STF2Δ.EIII+ monomer. The protein was then concentrated and further purified using SD200 to separate the monomeric form of the protein from aggregates. The purified material migrated with an apparent molecular weight of about 43 kDa on SDS PAGE and contained acceptable levels of endotoxin (about 0.03 EU/ug).

Fed Batch Production of Fusion Proteins

[0743] STF2Δ.EIIIs+ was produced in an aerobic bioreactor using a fed batch process. Three control loops were placed to control pH by acid (2 N HCl) or base (3 N NH₄OH) addition, temperature by heating (heating blanket) or cooling (time cycled cooling loop), and dissolved oxygen by compressed air flow (manually controlled), agitation (mixing speed) and O₂ flow (timed cycled) in cascade. Cells [BLR(DE3) pLysS that harbor the STF2Δ.EIIIs+ were adapted to and banked in MRSF media (see infra), and frozen in 25% glycerol. Cells were scaled up for the bioreactor by adding 1 mL of banked cells to 1 L of MRSF media and agitating at about 37° C. for about 15.5 to about 16.5 hours. Cells from the scale up process were added in a about 1:10 ratio to MRSF or MRBR synthetic media at about 37° C. and about 0.5 vvm air flow.

[0744] The process, was run in batch mode at about 37° C. until the cells oxygen consumption was such that the compressed air flow is about 1.5 vvm and the agitation is at the maximum, about 6 hours, when the temperature is dropped to between about 25° C. and about 33° C. The feed can be started before the culture is induced, or up to about 1 and about ½ hours after. The feed rate can be kept constant, or adjusted based on process variables (dissolved oxygen, glucose concentration). The culture was induced with IPTG upon batch glucose exhaustion. The culture was maintained for a minimum of about 2 hours and a maximum of about 20 hours.

| | |
|---|---|
| MRBR Media | Trace Metal Solution 1000× |

| Composition | g/L | Component | g/L |
|---|---|---|---|
| Glucose | 20 | EDTA, disodium | 5 |
| KH₂PO₄ | 2.2 | FeSO₄(7H₂O) | 10 |
| (NH₄)₂SO₄ | 4.5 | ZnSO₄(7H₂O) | 2 |
| Citric Acid | 1.0 | MnSO₄(H₂O) | 2 |
| MgSO₄(7H₂0) | 1.0 | CoCl₂(6H₂O) | 0.2 |
| CaCl₂ | 0.04 | CuSO₄(5H₂O) | 0.1 |
| Trace Metals | 1 ml | Na₂MoO₄(2H₂O) | 0.2 |
| Thiamine HCl | 0.01 | H₃BO₃ | 0.1 |
| Antifoam | 0.05 | | |

| MRSF Media | | Feed Media | |
|---|---|---|---|
| Composition | g/L | Composition | g/L |
| Glucose | 10 (20 in bioreactor) | NaCl | 0.5 |
| KH₂PO₄ | 7.8 | FeSO₄(7H₂O) | 2 |
| (NH₄)₂SO4 | 2.33 | CaCl₂ | 3.5 |
| Citric Acid | 1.0 | MgSO₄(7H₂O) | 12 |
| MgSO₄(7H₂0) | 1.0 | Thiamine HCl | 1 |
| CaCl₂ | 0.04 | Trace Metals | 1 ml |
| Trace Metals | 1 ml | Glucose | 100 |
| Thiamine HCl | 0.01 | | |
| Kanamycin | 0.0075 (shake flask only) | | |

[0745] STF2Δ.EIIIs+ was produced as inclusion bodies. Upon harvest, the cells were separated from the conditioned media by centrifugation (Beckman Avanti J-20 XP, JLA 8.1000 rotor, 10 kxg for about 20 minutes at about 4° C.) and resuspended in equal volume of 50 mM Tris, 100 mM NaCl, 1 mM EDTA, pH 8.0. The centrifugation was repeated under the same conditions, with the cells resuspended in a minimum volume of the same buffer. The suspension was passed through a homogenizer (APV-1000) at >10,000 psi for at least two passes.

[0746] The solids can be separated and the STF2Δ.EIIIs solubilized by one of three methods; centrifugation, filtration, or fluidized bed chromatography.

Method 1

[0747] Solids are separated by centrifugation (Beckman Avanti J-20 XP, JA 20 rotor, 20 kxg for 20 minutes at 4° C.) and resuspended in 50 mM tris, 1 m NaCl, 1 mM EDTA, 1% glycerol, 0.5% Triton X-100, pH 8.0. This process was repeated up to 6 times (total) at increasing speeds and times (to a maximum of about 40 kxg for about 20 minutes). After the final pellet recovery, the pellet was resuspended in 50 mM Tris, 0.1M NaCl, 1 mM EDTA, pH 8.0 and clarified by centrifugation (Beckman Avanti J-20 XP, JA 20 rotor, 40 kxg for about 20 minutes at about 4° C.) The pellet was resuspended and dissolved in 50 mM Tris, 0.1M NaCl, 1 mM EDTA, 4 M urea, pH 8.0. Insolubles were removed by centrifugation (Beckman Avanti J-20 XP, JA 20 rotor, 40 kxg for about 50 minutes at about 4° C.), the supernatant retained for further processing.

[0748] After the multiple washes described above, STF2Δ.EIIIs can also be dissolved in 50 mM acetate, 10 mM NaCl, 8M urea, pH about 4.1 to about 5.3 and clarified by centrifugation (Beckman Avanti J-20 XP, JA 20 rotor, 20 kxg for about 20 minutes).

Method 2

[0749] After homogenization, the lysate was captured in body feed and STF2Δ.EIIIs+ extracted with urea containing buffer. Body feed is a filter aid designed to trap particles in a cake above a depth filter. The body feed (Advanced Minerals Corporation CelPure 65) is a diatomite (silica powder) with a high surface area and low permeability, retaining <0.2 μm particles. The filter aid was pre-mixed with the lysate and pumped over a depth filter (Ertel 703), building up a cake containing both body feed and lysate particles. The suspension creates a depth filter as the particles settle on the filter pad. A 50 mM Tris, 100 mM NaCl pH 8.0 wash was performed to remove soluble proteins and nucleic acids. A subsequent wash with 50 mM Tris, 100 mM NaCl, 4 M urea, pH 8 solubilizes and removes the STF2Δ.EIIIs from the body feed for further processing.

Method 3

[0750] After the cells were initially resuspended in buffer, they were resuspended in sodium chloride and urea containing buffer at pH about 6 to about 8 and homogenized. The lysate was applied on a Streamline CST fluidized bed column (GE Healthcare) where the STF2Δ.EIIIs+ binds to the resin and the particulates flow through. STF2Δ.EIIIs+ may be eluted in low salt conditions at a pH greater than the load pH, in the presence or absence of detergents such as Triton X-100 or polysorbate 80.

SDS-PAGE

[0751] Proteins (typically about 5 μg) were diluted in SDS-PAGE sample buffer with and without β-mercaptoethanol. The samples were boiled for 5 minutes and loaded onto a 4-20% SDS polyacrylamide gel. Following electrophoresis, gels were stained with coomassie blue to visualize protein bands.

Endotoxin Assay

[0752] Endotoxin levels were measured using the QCL-1000 Quantitative Chromogenic LAL test kit (BioWhittaker #50-648U, Walkersville, Md.), following the manufacturer's instructions for the microplate method.

Protein Assay

[0753] Protein concentrations were determined by the MicroBCA Protein Assay Reagent Kit in a 96-well format using BSA as a standard (Pierce Biotechnology, Rockford, Ill.).

TLR5 Bioactivity Assay

[0754] HEK293 cells (ATCC, Catalog No. CRL-1573 Manassas, Va.) constitutively express TLR5, and secrete several soluble factors, including IL-8, in response to TLR5 signaling. Cells were seeded in 96-well microplates (about 50,000 cells/well), fusion proteins added and incubated overnight. The next day, the conditioned medium was harvested, transferred to a clean 96-well microplate, and frozen at −20° C. After thawing, the conditioned medium was assayed for the presence of IL-8 in a sandwich ELISA using an anti-human IL-8 matched antibody pair (Pierce, #M801E and #M802B, Rockford, Ill.) following the manufacturer's instructions. Optical density was measured using a microplate spectrophotometer (FARCyte, Amersham Biosciences, Piscataway, N.J.).

Plaque Reduction Neturalization Test (PRNT)

[0755] PRNT was performed according to Wang, et al., J. Immunol. 167:5273-5277 (2001). Briefly, serum samples were heat inactivated by incubation in a 56° C. water bath for about 30 min and were serially diluted in PBS with 5% gelatin from 1/10 to 1/2560. West Nile virus was diluted in PBS with 5% gelatin so that the final concentration was about 100 PFU/well. Virus was mixed with about 75 μl serum in a 96-well plate at about 37° C. for about 1 h. Aliquots of serum-virus mixture were inoculated onto confluent monolayers of Vero cells in a six-well tissue culture plate. The cells were incubated at about 37° C. for 1 h, and the plates were shaken every 15 min. The agarose overlay was then added. The overlay was prepared by mixing equal volumes of a solution consisting of 100 ml 2×MEM (Life Technologies) with sterile 2% agarose. Both solutions were placed in a 40° C. water bath for 1 h before adding the overlay. The cells were incubated for 4 days at 37° C. in a humidified 5% CO₂-air mixture. A second overlay with an additional 4% neutral red was added on day 5. Virus plaques were counted about 12 h later.

Antigenicity of STF2Δ-Fusion Proteins

[0756] ELISA plates (96-well) were coated overnight at 4° C. with serial dilutions (100 μl/well) of purified STF2Δ-fusion proteins (SEQ ID NOS: 761, 762, 657, 658, 673, 674) in PBS (about 2 μg/ml). Plates were blocked with 200 μl/well of Assay Diluent Buffer (ADB; BD Pharmingen) for one hour at room temperature. The plates were washed 3× in PBS-Tween, and then incubated with antibodies reactive with flagellin or the E domain of the construct. The expression of flagellin was detected using the mAb 6H11 (Intotek), while the antigenicity of WNV-E was monitored using a panel of mAb (5C5, 7H2, 5H10, 3A3, and 3D9) (Beasley, D. W., et al., J. Virol. 76:13097-13100 (2002)) were purchased from Bioreliance (Road Rockville, Md.). Antibodies diluted in ADB (about 100 μl/well) were incubated overnight at 4° C. The plates were washed 3× with PBS-T. HRP-labeled goat anti-mouse IgG antibodies (Jackson Immunochemical, West Grove, Pa.) diluted in ADB were added (100 μl/well) and the plates were incubated at room temperature for 1 hour. The plates were washed 3× with PBS-T. After adding TMB (3,3′,5,5′-tetramentylbenzidine) Ultra substrate (Pierce Biotechnology, Rockford, Ill.) and monitoring color development, A₄₅₀ was measured on a Tecan Farcyte microspectrophotometer.

Immunization of Mice

[0757] C3H/HeN mice (10 per group) were immunized intraperitoneally or subcutaneously with the indicated concentrations of fusion proteins or synthetic peptides on days 0, 14 and 28. On days 21 and 35, immunized animals were bled by retro-orbital puncture. Sera were harvested by clotting and centrifugation of the heparin-free blood samples. On day 35, mice were challenged with a lethal dose of WNV strain 2741 (Wang, T., et al., J. Immunol 167:5273-5277 (2001)). Survival was monitored for 21 days post-challenge.

Serum Antibody Determination

[0758] West Nile envelope protein specific IgG levels were determined by ELISA. ELISA plates (96-wells) were coated overnight at about 4° C. with 100 μl/well of West Nile E protein mAb 5C5, 7H2, 5H10, 3A3, and 3D9 (Beasley, D. W., et al., J. Viro. 76:13097-13100 (2002)) (Bioreliance, Road Rockville, Md.) in PBS at a concentration of 2 μg/ml. Plates were blocked with 200 μl/well of Assay Diluent Buffer (ADB; BD Pharmingen, San Diego Calif.) for one hour at room temperature. The plates were washed 3× in PBS-T. Dilutions of the sera in ADB were added (100 μl/well) and the plates were incubated overnight at 4° C. The plates were washed 3× with PBS-T. HRP-labeled goat anti-mouse IgG antibodies (Jackson Immunochemical, West Grove, Pa.) diluted in ADB were added (100 μl/well) and the plates were incubated at room temperature for 1 hour. The plates were washed 3× with PBS-T. After adding TMB (3,3′,5,5′-tetramentylbenzidine) Ultra substrate (Pierce Biotechnology, Rockford, Ill.) and monitoring color development, A₄₅₀ was measured on a Tecan Farcyte microspectrophotometer.

[0759] Production of Pam3Cys.WNV001 Peptide Synthesis

[0760] Pam3Cys.WNV001 was synthesized by Bachem Bioscience, Inc. (King of Prussia, Pa.). WNV001 is a 20 amino acid peptide (SEQ ID NO: 771) of the West Nile virus envelope protein chemically coupled to a tri-palmitoylcysteine (Pam3Cys) moiety through the amino terminal serine residue of the peptide. The chemical name for Pam3Cys.WNV001 is [Palmitoyl-Cys((RS)-2,3-di(palmitoyloxy)-propyl)-LTSGHLKCRVKMEKLQLKGT (SEQ ID NO: 771) acetate salt]. The molecular mass of Pam3Cys.WNV001 is 3163.3 daltons. The peptide was synthesized by Bachem using solid phase synthesis methodologies and FMOC chemistry. The amino acid sequence of Pam3Cys.WNV001 was assembled on an H-Pro-2-chlorotrityl chloride resin by solid phase peptide synthesis. The peptide chain was elongated by successive coupling of the amino acid derivatives. Each coupling step was preceded by an Fmoc-deprotection step and were accompanied by repeated washing of the resin. After coupling of the last amino acid derivative, the final Fmoc-deprotection step was performed. Finally, the peptide resin washed and dried under reduced pressure. During solid phase peptide synthesis color indicator tests were performed for each step to monitor the completion of the Fmoc-cleavage and the subsequent coupling of the amino acid derivatives. To couple Pam3Cys-OH to the elongated peptide, the lipid moiety was pre-activated with N,N′-dicyclohexyl-carbodiimide (DCCI) in the presence of 1-hydroxybenzotriazole (HOBt). The resulting solution was filtered and added to the peptide resin. At the end of the reaction time the peptide resin washed and dried under reduced pressure. Color indicator tests were performed to control the coupling of Pam3Cys-OH. The completed peptide was cleaved from the resin by incubating with trifluoroacetic acid (TFA). The liberated product (crude peptide material) was precipitated from the reaction mixture and lyophilized. The crude product was used for initial immunogenicity studies.

Synthesis of WNV-E Peptide Arrays

[0761] Peptide arrays (SEQ ID NOS: 703-754) were synthesized by Sigma Genosys (Woodlands, Tex.).

### Results

West Nile Fusion Protein

[0762] West Nile virus (WNV) has emerged in recent years in temperate regions of Europe and North America, presenting a threat to public and animal health. The most serious manifestation of WNV infection is fatal encephalitis (inflammation of the brain) in humans and horses, as well as mortality in certain domestic and wild birds. WNV has also been a significant cause of human illness in the United States. The envelope glycoprotein of West Nile (WNV-E) and other flaviviruses may generate neutralizing and protective antibodies. By linking this antigen to a Toll-like Receptor ligand, the compositions, fusion proteins and polypeptides described herein may target appropriate antigen presenting cells without the need for adjuvant or other immune modulator formulations.

[0763] As described herein, several strategies have been implemented to facilitate production of West Nile virus envelope (WNV-E) fusion proteins in E. coli. One approach is to engineer a smaller WNV-E antigen by fusing domain III (EIII) and, optionally, with amino acids of domain II of the WNV-E protein to full-length STF2 (e.g., STF2.E, STF2.EIII+). Domain III is responsible for virus-host interactions and retains many West Nile virus neutralizing antibody epitopes. It also contains only 2 of the 12 cysteine residues present within the full length envelope protein, making expression in E. coli more feasible. A second approach has been to delete the hyper-variable hinge region of flagellin (e.g., STF2Δ) thereby creating a smaller fusion protein (STF2Δ.EIII+) The hyper-variable region of flagellin is not required for TLR5 signaling and its removal may also reduce the immunogenic potential of flagellin. Both STF2.EIII+ and STF2Δ.EIII+ have been expressed in E. coli and purified. The purified proteins have been characterized for TLR5 signaling activity in bioassays and for E epitope display in ELISA assays using a panel of WNV-E polyclonal and neutralizing monoclonal antibodies. Results from these studies indicate that STF2Δ.EIII+ has higher PAMP activity and more conformation-sensitive neutralizing WNV-E epitopes than STF2.EIII+.

Purity of STF2.EIII+ and STF2Δ.EIII+

[0764] Several lots of STF2.EIII+ and STF2Δ.EIII+ have been produced in E. coli and purified (Table 12). STF2.EIII+ was expressed as a soluble protein and purified under non-denaturing conditions using a 4-step process, as described above, that included anion exchange chromatography and gel filtration. Final yields from 6 L cultures ranged from about 0.9 mg to about 3.8 mg and all preparations contained low levels of endotoxin as measured by standard LAL procedures (about <0.1 EU/μg protein, see supra). In contrast, STF2Δ.EIII+ formed inclusion bodies in E. coli, and was purified under denaturing conditions. All chromatography steps used to purify STF2Δ.EIII+ required the use of 8M urea. Following purification, the denatured protein was refolded by step-wise dialysis to allow for gradual urea removal. Refolding was typically carried out at protein concentrations of about 0.3 mg/ml without any loss due to protein precipitation. Two preparations of STF2Δ.EIII+ from a single 6 L culture yielded about 1.2 and about 6.7 mg of protein, both of which had acceptable endotoxin levels. As expected, purified STF2.EIII+ and STF2Δ.EIII+ migrated on SDS PAGE under reducing conditions as about 65 kDa and about 43 kDa proteins, respectively. Notably, STF2Δ.EIII+ migrated slightly faster under non-reducing conditions. This altered migration may be due to disulfide bond formation involving the two cysteines residues in domain III of the envelope protein. As well, a larger species of STF2Δ.EIII+ was detected by Western blot analysis whose molecular weight is consistent with a trimer form of the protein (“(STF2Δ.EIII+)×3 or 3 units of STF2Δ.EIII+”).

TABLE 11
Endotoxin levels and TLR-5 activity for STF2.EIII+ (SEQ ID NO:
658) and STF2Δ.EIII+ (SEQ ID NO: 674) fusion proteins.

| | | | Endotoxin | | |
|---|---|---|---|---|---|
| Batch | | Yield | Levels | TLR-5 | |
| Number | Protein | (mg) | (EU/μg) | EC₅₀ | |
| 052 | STF2.EIII+ | 3.8 | 0.03 | >5000.00 | ng/ml |
| 054 | STF2.EIII+ | 0.9 | 0.02 | 1195.00 | ng/ml |
| 057 | STF2.EIII+ | 1.6 | 0.07 | 197.92 | ng/ml |
| 044 | STF2Δ.EIII+ | 1.2 | 0.07 | 1.13 | ng/ml |
| 045 | STF2Δ.EIII+ | 6.7 | 0.07 | 4.34 | ng/ml |

TLR5 Activity in the HEK293 IL-8 Assay

[0765] To compare the PAMP activity of both fusion proteins, a TLR5 bioassay was performed. HEK293 IL-8 cells were treated with serial dilutions of two independent protein batches (FIGS. 62A and 62B). Cultures were incubated for a 24 hour period and conditioned media were harvested and assayed for IL-8 production by ELISA. As shown in FIG. 62A, STF2Δ.EIII+ showed potent TLR-5 activity. Regression analysis of the titration curve determined the EC₅₀ of batches 2004-044 and 2004-045 to be 1.13 ng/ml and 4.34 ng/ml, respectively (Table 11, supra). In both cases, the TLR5 specific-activity was at least about 10-fold higher than the control protein STF2.OVA. In contrast, 2 preparations of STF2.EIII+ showed significantly weaker TLR5 activity than STF2.OVA. The EC₅₀ of STF2.EIII+ batches 054 and 057 were about 1195.00 ng/ml and about 197.92 ng/ml.

Antigenicity of STF2.EIII+ and STF2Δ.EIII+

[0766] The antigenicity of STF2.EIII+ and STF2Δ.EIII+ was examined by direct ELISA using a flagellin monoclonal antibody specific for the N-terminal region of STF2 (6H11, Inotek Pharmaceuticals, Beverly, Mass.) and a panel of WNV-E-specific antibodies (5C5, 5H10, 3A3, 7H2 and 3D9, Bioreliance, Road Rockville, Md.) previously shown to neutralize West Nile virus in vitro. As shown in FIG. 63, a comparison of the reactivity of full length West Nile virus envelope protein with STF2Δ.EIII+ revealed that West Nile virus monoclonal antibodies 5C5, 5H110, 3A3 and 7H2, but not 3D9 recognize the fusion protein. This pattern of reactivity is consistent with the proposed location of 5C5, 5H10, 3A3 and 7H2 epitopes within EIII. The epitope for 3D9 lies outside of domain III of the West Nile virus envelope protein. As expected, all West Nile virus monoclonal antibodies reacted with full length West Nile virus envelope protein and the flagellin monoclonal only reacted with STF2Δ.EIII+. Both proteins reacted with a polyclonal West Nile virus envelope antiserum, but STF2Δ.EIII+ reactivity was somewhat reduced, perhaps due to the reduced number of potential epitopes present in the smaller domain.

[0767] Using 5C5 and 7H10 WNV monoclonal antibodies, a direct antigenic comparison was made between STF2.EIII+ and STF2Δ.EIII+ (FIGS. 64A, 64B, 64C and 64D). In these studies, plates were coated with the indicated proteins and then detected with polyclonal rabbit anti-E, or mouse monoclonal antibodies as described. As shown in FIGS. 64A, 64B, 64C and 64D, both STF2.EIII+ and STF2Δ.EIII+ were readily detected with the flagellin monoclonal antibody with no significant differences in reactivity. However, distinct reactivity with the anti-envelope monoclonal antibodies was observed. The reactivity of STF2Δ.EIII+ with either 5C5 or 7H2 was significantly greater than that observed with STF2.EIII+. Collectively, these results indicate that the flagellin 6H11 epitope of STF2Δ.EIII+ is un compromised and is comparable to the flagellin sequence of STF2.EIII+. They also highlight distinct differences in the antigenicity of the EIII domains of these proteins and indicate that STF2Δ.EIII+ contains more of the critical conformation dependent neutralizing epitopes than STF2.EIII+.

Efficacy and Immunogenicity

[0768] Several efficacy studies designed to examine the protective efficacy our candidates in C3H/HeN mice following challenge with West Nile virus have been completed. Studies typically consisted of 5 groups of mice (10 mice per group) immunized intraperitoneally (i.p.) or subcutaneously (s.c.) on days 0, 14 and 28. On days 21 and 35, sera were harvested and tested for West Nile virus envelope protein—IgG antibody (ELISA) and the ability to neutralize West Nile virus in vitro (PRNT assay). On day 35, mice were challenged with a lethal dose of West Nile virus strain 2741. Survival was monitored for 21 days post-challenge.

[0769] Mice were immunized with PBS, Drosophila conditioned medium containing STF2.E (CM, positive control), 25 μg of STF2Δ.EIII+ i.p., 25 μg STF2Δ.EIII+ s.c., 25 μg STF2.EIII+ i.p. and 25 μg STF2.EIII+ s.c. The West Nile virus envelope protein antibody responses and survival data are shown FIGS. 65 and 66. By day 35 all groups that received STF2Δ.EIII+ had significant levels of West Nile virus envelope protein IgG. In contrast, mice that received STF2.EIII+ had no measurable West Nile virus envelope protein antibody response. Administration of STF2Δ.EIII+ i.p. or s.c led to 100% survival following West Nile virus challenge. Consistent with the poor immunogenicity of STF2.EIII+, little to no protection was provided by this candidate when compared to the PBS control. The poor immunogenicity and efficacy of STF2.EIII+ in this study are attributed to the reduced TLR5 activity and/or the weak EIII epitope reactivity of this protein.

Plaque Reduction Neutralization Titers

[0770] To further evaluate the West Nile virus envelope protein antibody response elicited by STF2Δ.EIII+ and potentially correlate protective efficacy with neutralizing antibody titers, the plaque reduction neutralization test (PRNT) was performed. Day 35 serum samples from efficacy studies described above were tested for their ability to block West Nile virus infection in cultured Vero cells. Briefly, pooled mouse serum samples were heat-inactivated and serially diluted two-fold in PBS with 0.5% gelatin. Dilutions starting with 1:10 were incubated with about 100 pfu of the West Nile virus strain 2741. The virus/serum mixture was incubated at about 37° C. for 1 h and then inoculated onto confluent monolayers of Vero cells (ATCC, Catalog Number CCL-81, Manassas, Va.) in duplicate wells of 6-well tissue culture plates. The virus was allowed to adsorb to the cell monolayer prior to adding a 1% agarose overlay. Infected cell cultures were incubated for 4 days at 37° C. followed by a second agarose overlay containing 4% neutral red. Virus plaques were counted 12 h later. Serum titers that led to 80% reduction in viral plaque numbers (PRNT₈₀) were recorded.

[0771] A summary of the PRNT₈₀ data from efficacy studies concerning STF2.EIII+ and STF2Δ.EIII+ is presented in Table 12 below. In two independent studies involving STF2.EIII+ where survival of about 50% or less was reported, pooled sera failed to inhibit plaque formation. This finding is not surprising given the weak antibody response elicited by this construct. In three efficacy studies involving STF2Δ.EIII+ where survival was about 70% or greater, pooled sera had neutralization titers of 1:40 or better. Neutralization titers of 1:40 or greater typically correlate with protection in vivo.

TABLE 12
Survivial and PRNT₈₀ Results for STF2.EIII+ (SEQ ID
NO: 658), STF2Δ.EIII+ (SEQ ID NO: 674) and STF2.E
(SEQ ID NO: 762) CM (Control Media) Fusion Proteins

| | | | Study | Survival | PRNT₈₀ |
|---|---|---|---|---|---|
| Batch | Candidate | Route | # | (%) | (dilution) |
| 054 | STF2.EIII+ | i.p. | 3 | 50 | Negative |
| 057 | STF2.EIII+ | i.p. | 4 | 11 | Negative |
| 057 | STF2.EIII+ | s.c. | 4 | 20 | negative |
| 044 | STF2Δ.EIII+ | i.p. | 2 | 70 | 1:40 |
| 045 | STF2Δ.EIII+ | i.p. | 3 | 90 | 1:40 |
| 045 | STF2Δ.EIII+ | s.c. | 3 | 100 | 1:160 |
| 045 | STF2Δ.EIII+ | i.p. | 4 | 100 | 1:80 |
| 045 | STF2Δ.EIII+ | s.c. | 4 | 100 | 1:40 |
| — | STF2.E CM | i.p. | 3 | 90 | 1:640 |
| — | STF2.E CM | i.p. | 4 | — | 1:1280 |

STF2Δ.EIIIs+ a Modified Version of STF2Δ.EIII+

[0772] Protein preparations of STF2Δ.EIII+ tested in the mouse efficacy studies described above were purified by anion-exchange and size-exclusion chromatography steps carried out under denaturing conditions followed by refolding using step-wise dialysis. With this process, two predominant species that correspond to the monomeric and trimeric forms of STF2Δ.EIII+ were generated and present as a mixture in the final product. To minimize the heterogeneity of the final product, new refolding and purification methods have been developed that favor the production of either monomer or trimer. Because it is unclear which form of STF2Δ.EIII+ is the active component or if both are equally potent, both species have been produced in milligram quantities and tested for efficacy in mice.

[0773] It was initially unclear as to why STF2Δ.EIII+ refolding resulted in the formation of a trimeric species. However, when the sequence of the STF2Δ.EIII+ expression construct was re-examined, we identified a cysteine residue within the linker sequence that separates STF2Δ from EIII+. The presence of this cysteine would likely interfere with the formation of the appropriate disulfide bond during refolding and might account for the trimeric form of STF2Δ.EIII+. This unnecessary cysteine was changed to a serine using site-directed mutagenesis and the modified protein (STF2Δ.EIIIs+) was produced and purified. It should be noted that refolding the serine-substituted construct yielded only monomeric protein.

[0774] Protective efficacy of STF2Δ.EIII+ (monomer) and STF2Δ.EIIIs+ (trimer) were evaluated in C3H/HeN mice following challenge with West Nile virus. Five groups of mice (10 per group) were immunized with about 25 ug of protein s.c. on days 0, 14 and 28. On days 21 and 35, sera were harvested and tested for WNV-E IgG antibody (ELISA). On day 38, mice were challenged with a lethal dose of WNV strain 2741 and survival was monitored for 21 days. ELISA results from boost 2 (day 35, FIG. 67) and survival data (FIG. 68) indicate that all constructs elicited significant levels of WNV-E reactive IgG prior to viral challenge and provided about 90% to about 100% protection against the lethal infection. These findings indicate that monomeric or multimeric (e.g., trimers) forms of STFΔ.EIII+ are efficacious and removal of the additional cysteine from the construct does not appreciably impact potency. Removal of the cysteine within the linker sequence may simplify purification of the protein by reducing heterogeneity following protein refolding.

Conclusion

[0775] Two recombinant fusion proteins containing the Salmonella typhimurium flagellin (STF2) fused to EIII+ domain of West Nile virus envelope protein have been generated. One includes the full length STF2 sequence (STF2.EIII+) and the other a modified version of STF2 that lacks the internal hypervariable region of STF2 (STF2Δ.EIII+). Both proteins have been expressed in E. coli and purified by conventional means using anion exchange chromatography and gel filtration. STF2.EIII+ was produced as a soluble protein and was purified under non-denaturing conditions. In contrast, STF2Δ.EIII+ was expressed as an insoluble protein and was purified under denaturing conditions and refolded by step-wise dialysis to remove urea. In HEK293 IL8 assays, preparations of STF2Δ.EIII+ showed greater TLR-5 activity than STF2.EIII+.

[0776] In envelope protein epitope display analysis using ELISA assays and West Nile virus envelope protein antibodies, STF2Δ.EIII+ displayed more of the critical conformation dependent neutralizing epitopes. Consistent with the potent TLR-5 activity and envelope protein epitope antigenicity observed with STF2Δ.EIII+, STF2Δ.EIII+ was highly immunogenic and efficacious in mice challenged with a lethal dose of West Nile virus. Because monomeric and trimeric species of STF2Δ.EIII+ were generated during the purification process of this protein, a cysteine within the linker sequence of the expression construct was changed to a serine. Removal of this cysteine eliminated the production of trimeric forms of the protein during refolding and resulted in the generation of monomeric product that displayed potent efficacy in vivo.

Japanese Encephalitis Fusion Protein

[0777] JE virus is localized in Asia and northern Australia (about 50,000 cases with about 10,000 deaths annually). An approved inactivated virus vaccine was recently associated with a case of acute disseminated encephalomyelitis, prompting the Japanese Ministry of Health, Labor and Welfare to recommend the nationwide suspension of the vaccine. Given the complexities of producing inactivated viruses in infected mouse brains or even in cell culture, and the potential for adverse events associated with inactivated viruses, the opportunity for recombinant-based JE vaccine is appealing.

[0778] A STF2Δ.JEIII+ fusion construct was constructed. The JE EIII+DNA fragment was generated synthetically and codon optimized for expression in E. coli. The sequence was ligated into pET24STF2Δ to generate pETSTF2Δ.JEIII+. Expression constructs have been screened by restriction analysis and for expression in E. coli BLR(DE3) by IPTG induction. The DNA sequence of each construct has been confirmed, and production of the protein has been scaled up. A batch of material has been generated. A total of about 24 mg of material was purified. This material has potent TLR5 activity, acceptable levels of endotoxin (about 0.03 EU/μg) and a A280/A260 ratio of about 1.3.

Flavivirus Peptides

Identification of WNV-E Specific Antibody Epitopes

[0779] To identify linear epitopes within the West Nile virus envelope protein that are recognized by antisera from STFΔ.EIIIs+ immunized mice, several synthetic peptide arrays were generated. One array consisted of overlapping peptides of 20 amino acids in length that spanned the entire West Nile virus domain III and parts of domain II (SEQ ID NOS: 728-754). ELISA results with this array identified a highly reactive 20 amino acid sequence that mapped to the N-terminal region of domain III and included part of the domain I domain CRVKMEKLQLKGTTYGVCSK (SEQ ID NO: 728). To fine map this epitope, additional arrays were generated that focused on the domain I and II junctions (SEQ ID NOS: 703-754). These arrays included an alanine substitution scan to identify amino acids critical for antibody binding (SEQ ID NOS: 728-754). As shown in FIGS. 69 and 70, antisera from STF2Δ.EIII (monomer and trimer) and STF2Δ.EIIIs+ immunized mice reacted with peptides that spanned the EI/EII junction (peptides E-30 to E-42) and included the E2-21 peptide CRVKMEKLQLKGTTYGVCSK (SEQ ID NO: 728). This reactivity was severely reduced when specific amino acids (E6, K7, L10 and K11) were changed to alanines (FIG. 71). Although it is not known if the antibodies that recognize this epitope are neutralizing, efforts are underway to design and test a peptide vaccine based on this region of WNV-E.

Immunogenicity of Pam3Cys.WNV001 Peptide Vaccine.

[0780] A lipidated West Nile virus envelope protein fused to Pam3Cys on the N-terminal end was synthesized using the 20 amino acid sequence LTSGHLKCRVKMEKLQLKGT (SEQ ID NO:772) (Putnak, R., et al, Vaccine 23:4442-4452 (2005)). The immunogenicity of this peptide was tested in C3H/HeN mice and compared to peptide without Pam3Cys (FIG. 72). The reactivity of antisera from immunized animals was tested by direct ELISA as described in the legend and the results indicate that the Pam3Cys.WNV001 peptide is significantly more immunogenic than the peptide without the TLR2 modification. The antisera from these studies will be tested in virus neutralization assays (PRNT) to determine if the antibodies elicited will neutralize West Nile virus in vitro. The lipidated peptide will also be tested in the West Nile virus challenge model to assess protective efficacy against a lethal virus challenge.

Assay Development

Competition ELISA Assay Development

[0781] To assess the neutralizing potential of antisera derived from immunized mice, a competition ELISA assay was developed using well-characterized monoclonal antibody (7H2) that neutralizes West Nile virus in culture and reacts with a conformation-sensitive epitope within the EIII domain of the West Nile virus envelope protein antigen. The assay was designed as a capture ELISA that measures the ability of sera from immunized animals to prevent 7H2 from binding West Nile virus envelope protein. Serial dilutions ranging from 1:10 to 1:5000 of day 35 mouse antisera from efficacy study 4 (FIGS. 65 and 66, Table 13) were incubated with biotinylated West Nile virus envelope protein and then added to ELISA plates pre-coated with 7H2 monoclonal antibody (Bioreliance, Road Rockville, Md.). Following several washes to remove unbound material, bound West Nile virus envelope protein was detected using avidin-HRP. Results from a representative experiment are shown in FIG. 69. At dilutions of 1:25, a measurable loss of West Nile virus envelope protein binding to 7H2-coated plates was observed when antisera derived from animals immunized with STF2Δ.EIIIs where tested. No competition was detected with antisera derived from mock immunized animals that received PBS in place of antigen. These initial results demonstrate that antibodies elicited by STF2Δ.EIII+ compete with 7H2 for binding Wests Nile virus envelope protein. These findings are consistent with the protection from WNV infection observed in animals immunized with STF2Δ.EIII+ and help establish a correlation between antibody epitope reactivity in vitro and efficacy in vivo.

[0782] While this invention has been particularly shown and described with references to example embodiments thereof, it will be understood by those skilled in the art that various changes in form and details may be made therein without departing from the scope of the invention encompassed by the appended claims.

What is claimed is:

1. A composition comprising a flagellin component that is at least a portion of a flagellin, wherein the flagellin component includes at least one cysteine residue and whereby the flagellin component activates a Toll-like Receptor 5.

2. The composition of claim 1, further including at least a portion of at least one member selected from the group consisting of a Toll-like Receptor 1 agonist, a Toll-like Receptor 2 agonist, a Toll-like Receptor 3 agonist, a Toll-like Receptor 4 agonist, a Toll-like Receptor 6 agonist, a Toll-like Receptor 7 agonist, a Toll-like Receptor 8 agonist and a Toll-like Receptor 9 agonist.

3. The composition of claim 2, wherein the Toll-like Receptor 2 agonist is a Pam3Cys.

4. The composition of claim 3, wherein the Pam3Cys further includes at least one additional cysteine residue.

5. The composition of claim 1, wherein at least one cysteine residue substitutes for at least one amino acid residue in a naturally occurring flagellin amino acid sequence of the flagellin component.

6. The composition of claim 5, wherein the cysteine residue is remote to at least one amino acid of the Toll-like Receptor 5 recognition site of the flagellin component.

7. The composition of claim 1, wherein the flagellin component includes at least a portion of a naturally occurring flagellin amino acid sequence in combination with the cysteine residue.

8. The composition of claim 7, wherein the cysteine residue is at least one member selected from the group consisting of the amino-terminal amino acid of the flagellin component and the carboxy-terminal amino acid of the flagellin component.

9. The composition of claim 7, wherein the cysteine residue is remote to at least one amino acid of the Toll-like Receptor 5 recognition site of the flagellin component.

10. The composition of claim 1, wherein the flagellin component lacks at least a portion of a hypervariable region.

11. The composition of claim 1, further including at least a portion of at least one antigen.

12. The composition of claim 11, wherein the antigen is chemically conjugated to the flagellin component.

13. The composition of claim 12, wherein the antigen is essentially hydrophobic.

14. The composition of claim 13, wherein chemical conjugation results in increased aqueous solubility of the antigen as a component of the composition.

15. The composition of claim 1, wherein the cysteine residue is in the hypervariable region of the flagellin component.

16. The composition of claim 1, wherein the flagellin is at least a portion of at least one member selected from the group consisting of a S. typhimurium flagellin, an E. coli fliC flagellin, S. muenchen flagellin, P. aeruginosa flagellin and Listeria monocytogenes flagellin.

17. The composition of claim 16, wherein the flagellin is at least a portion of a S. typhimurium flagellin and the S. typhimurium flagellin is selected from the group consisting of SEQ ID NO: 812 and SEQ ID NO: 816.

18. The composition of claim 17, wherein at least one cysteine residue substitutes for at least one amino acid in a naturally occurring flagellin amino acid sequence of the flagellin component.

19. The composition of claim 18, wherein the amino acid is at least one amino acid selected from the group consisting of amino acid 1, 237, 238, 239, 240, 241 and 495 of SEQ ID NO: 812.

20. The composition of claim 17, wherein the flagellin is at least a portion of a S. typhimurium flagellin and the S. typhimurium flagellin includes at least a portion of SEQ ID NO: 816.

21. The composition of claim 20, wherein at least one cysteine residue substitutes for at least one amino acid in a naturally occurring flagellin amino acid sequence flagellin component.

22. The composition of claim 21, wherein the amino acid is at least one amino acid selected from the group consisting of amino acid 1, 240, 241, 242, 243, 244 and 505 of SEQ ID NO: 816.

23. The composition of claim 16, wherein the flagellin is at least a portion of an S. muenchen flagellin and the S. muenchen flagellin includes at least a portion of SEQ ID NO: 504.

24. The composition of claim 23, wherein at least one cysteine residue substitutes for at least one amino acid in a naturally occurring flagellin amino acid sequence flagellin component.

25. The composition of claim 24, wherein the amino acid is at least one amino acid selected from the group consisting of amino acid 1, 237, 238, 239, 240, 241 and 504 of SEQ ID NO: 504.

26. The composition of claim 16, wherein the flagellin is at least a portion of P. aeruginosa flagellin and the P. aeruginosa flagellin includes at least a portion of SEQ ID NO: 815.

27. The composition of claim 26, wherein at least one cysteine residue substitutes for at least one amino acid in a naturally occurring flagellin amino acid sequence flagellin component.

28. The composition of claim 27, wherein the amino acid is at least one amino acid selected from the group consisting of amino acid 1, 211, 212, 213 and 393 of SEQ ID NO: 815.

29. The composition of claim 16, wherein the flagellin includes at least a portion of a Listeria monocytogenes flagellin and the Listeria monocytogenes flagellin includes at least a portion of SEQ ID NO: 820.

30. The composition of claim 29, wherein at least one cysteine residue substitutes for at least one amino acid in a naturally occurring flagellin amino acid sequence flagellin component.

31. The composition of claim 30, wherein the amino acid is at least one amino acid selected from the group consisting of amino acid 1, 151, 152, 153, 154 and 287 of SEQ ID NO: 820.

32. The composition of claim 16, wherein the flagellin is at least a portion of E. coli flagellin and the E. coli flagellin includes at least a portion of SEQ ID NO: 502.

33. The composition of claim 32, wherein at least one cysteine residue substitutes for at least one amino acid in a naturally occurring flagellin amino acid sequence flagellin component.

34. The composition of claim 33, wherein the amino acid is at least one amino acid selected from the group consisting of amino acid 1, 238, 239, 240, 241, 242, 243 and 497 of SEQ ID NO: 502.

35. The composition of claim 11, wherein the antigen is at least a portion of an influenza antigen.

36. The composition of claim 35, wherein the influenza antigen is at least a portion of an integral membrane protein of influenza.

37. The composition of claim 35, wherein the influenza antigen is an influenza A antigen.

38. The composition of claim 35, wherein the influenza antigen is an influenza B antigen.

39. The composition of claim 35, wherein the influenza antigen is an influenza C antigen.

40. The composition of claim 36, wherein the integral membrane protein is at least a portion of a hemagglutinin protein.

41. The composition of claim 40, wherein the portion of the hemagglutinin protein includes at least a portion of a maturational cleavage site of the hemagglutinin protein.

42. The composition of claim 41, wherein the maturational cleavage site includes at least one member selected from the group consisting of SEQ ID NO: 530, SEQ ID NO: 532, SEQ ID NO: 533, SEQ ID NO: 534, SEQ ID NO: 535, SEQ ID NO: 600, SEQ ID NO: 601, SEQ ID NO: 602, SEQ ID NO: 603, SEQ ID NO: 821, SEQ ID NO: 796, SEQ ID NO: 797, SEQ ID NO: 798, SEQ ID NO: 799 and SEQ ID NO: 822.

43. The composition of claim 36, wherein the integral membrane protein includes at least a portion of a matrix 2 protein.

44. The composition of claim 11, wherein the antigen is at least a portion of at least one member selected from the group consisting of a West Nile viral protein, a Langat viral protein, a Kunjin viral protein, a Murray Valley encephalitis viral protein, a Japanese encephalitis viral protein, a Tick-borne encephalitis viral protein, Dengue 1 viral protein, Dengue 2 viral protein, Dengue 3 viral protein, Dengue 4 viral protein, hepatitis C viral protein and a Yellow fever viral protein.

45. The composition of claim 11, wherein the antigen includes a pathogen-related antigen.

46. The composition of claim 45, wherein the pathogen-related antigen is at least one member selected from the group consisting respiratory syncytial virus, Plasmodium falciparum and Plasmodium vivax.

47. The composition of claim 1, further including a carrier protein.

48. The composition of claim 47, wherein the carrier protein is at least one member selected from the group consisting of a tetanus toxoid, a Vibrio cholerae toxoid, a diphtheria toxoid, a cross-reactive mutant of diphtheria toxoid, a E. coli B subunit of a heat labile enterotoxin, a tobacco mosaic virus coat protein, a rabies virus envelope protein, a rabies virus envelope glycoprotein, a thyroglobulin, a heat shock protein 60, a keyhole limpet hemocyanin and an early secreted antigen tuberculosis-6.

49. The composition of claim 1, wherein at least one member selected from the group consisting of an arginine residue, a serine residue and a histidine residue substitutes for at least one lysine of at least one member selected from the group consisting of at least a portion of the flagellin component and at least a portion of the flagellin.

50. A composition comprising a Toll-like Receptor agonist component that is at least a portion of a Toll-like Receptor agonist, wherein the Toll-like Receptor agonist component includes at least one cysteine residue in a position where a cysteine residue does not occur in the native Toll-like Receptor agonist, whereby the Toll-like Receptor agonist component activates a Toll-like Receptor.

51. The composition of claim 50, wherein the Toll-like Receptor agonist component includes at least a portion of a naturally occurring Toll-like Receptor agonist in combination with the cysteine residue.

52. The composition of claim 51, wherein the cysteine residue is remote to at least one amino acid of the Toll-like Receptor recognition site of the Toll-like Receptor agonist component.

53. The composition of claim 50, wherein the Toll-like Receptor agonist is at least a portion of at least one member selected from the group consisting of a Toll-like Receptor 1 agonist, a Toll-like Receptor 2 agonist, a Toll-like Receptor 3 agonist, a Toll-like Receptor 4 agonist, a Toll-like Receptor 5 agonist, a Toll-like Receptor 6 agonist, a Toll-like Receptor 7 agonist, a Toll-like Receptor 8 agonist and a Toll-like Receptor 9 agonist.

54. The composition of claim 53, further including at least a portion of at least one antigen.

55. A composition comprising a flagellin component that is at least a portion of a flagellin, wherein at least one lysine of the flagellin component has been substituted with at least one arginine, whereby the flagellin component activates a Toll-like Receptor 5.

56. The composition of claim 55, wherein the flagellin is at least a portion of at least one member selected from the group consisting of a S. typhimurium flagellin, an E. coli fliC flagellin, S. muenchen flagellin, P. aeruginosa flagellin and Listeria monocytogenes flagellin.

57. The composition of claim 56, wherein the flagellin is at least a portion of a S. typhimurium flagellin and the S. typhimurium flagellin is selected from the group consisting of SEQ ID NO: 812 and SEQ ID NO: 816.

58. The composition of claim 57, wherein the lysine residue that is substituted with the arginine is at least one lysine residue selected from the group consisting of lysine 19, 41, 58, 135, 160, 177, 179, 203, 215, 221, 228, 232, 241, 251, 279, 292, 308, 317, 326, 338, 348, 357, 362, 369, 378, 384, 391 and 410 of SEQ ID NO: 812.

59. The composition of claim 57, wherein the lysine residue that is substituted with the arginine is at least one lysine residue selected from the group consisting of lysine 20, 42, 59, 136, 161, 177, 182, 189, 209, 227, 234, 249, 271, 281, 288, 299, 319, 325, 328, 337, 341, 355, 357, 369, 381, 390, 396, 403, 414 and 422 of SEQ ID NO: 816.

60. The composition of claim 56, wherein the flagellin is at least a portion of an E. coli fliC flagellin and the E. coli flagellin includes at least a portion of SEQ ID NO: 814.

61. The composition of claim 56, wherein the flagellin is at least a portion of a S. muenchen flagellin and the S. muenchen flagellin includes at least a portion of SEQ ID NO: 813.

62. The composition of claim 56, wherein the flagellin is at least a portion of a P. aeruginosa flagellin and the P. aeruginosa flagellin includes at least a portion of SEQ ID NO: 815.

63. The composition of claim 56, wherein the flagellin is at least a portion of a Listeria monocytogenes flagellin and the Listeria monocytogenes flagellin includes SEQ ID NO: 500.

64. The composition of claim 55, further including at least a portion of at least one antigen.

65. The composition of claim 64, wherein the antigen is conjugated to the flagellin component after substitution of the lysine for arginine.

66. The composition of claim 64, wherein the antigen is at least a portion of an influenza antigen.

67. The composition of claim 66, wherein the influenza antigen is at least a portion of an integral membrane protein.

68. The composition of claim 67, wherein the integral membrane protein includes at least a portion of a hemagglutinin protein.

69. The composition of claim 67, wherein the integral membrane protein includes at least a portion of a matrix 2 protein.

70. The composition of claim 66, wherein the influenza antigen is an influenza A antigen.

71. The composition of claim 66, wherein the influenza antigen is an influenza B antigen.

72. The composition of claim 66, wherein the influenza antigen is an influenza C antigen.

73. A composition comprising a flagellin component that is at least a portion of a flagellin, wherein at least one lysine of the flagellin component has been substituted with at least one serine residue, whereby the flagellin component activates a Toll-like Receptor 5.

74. A composition comprising a flagellin component that is at least a portion of a flagellin, wherein at least one lysine of the flagellin component has been substituted with at least one histidine residue, whereby the flagellin component activates a Toll-like Receptor 5.

75. A method of stimulating an immune response in a subject, comprising the step of administering to the subject a composition that includes a flagellin component that is at least a portion of a flagellin, wherein the flagellin component includes at least one cysteine residue and whereby the flagellin component activates a Toll-like Receptor 5.

76. The method of claim 75, further including at least a portion of at least one antigen.

77. A method of stimulating an immune response in a subject, comprising the step of administering to the subject a composition that includes a flagellin component that is at least a portion of a flagellin, wherein at least one lysine of the flagellin component has been substituted with at least one arginine, whereby the flagellin component activates a Toll-like Receptor 5.

78. The method of claim 77, further including at least a portion of at least one antigen.

79. A method of stimulating an immune response in a subject, comprising the step of administering to the subject a composition that includes a flagellin component that is at least a portion of a flagellin, wherein at least one lysine of the flagellin component has been substituted with at least one serine residue, whereby the flagellin component activates a Toll-like Receptor 5.

80. The method of claim 79, further including at least a portion of at least one antigen.

81. A method of stimulating an immune response in a subject, comprising the step of administering to the subject a composition that includes a flagellin component that is at least a portion of a flagellin, wherein at least one lysine of the flagellin component has been substituted with at least one histidine residue, and whereby the flagellin component activates a Toll-like Receptor 5.

82. The method of claim 81, further including at least a portion of at least one antigen.

83. A method of stimulating an immune response in a subject, comprising the step of administering to the subject a composition that includes a Toll-like Receptor agonist component that is at least a portion of a Toll-like Receptor agonist, wherein the Toll-like Receptor agonist component includes at least one cysteine residue in a position where a cysteine residue does not occur in the native Toll-like Receptor agonist, whereby the Toll-like Receptor agonist component activates a Toll-like Receptor agonist.

84. The method of claim 83, further including at least a portion of at least one antigen.

The application's sequence listing, which the Patent Office published only in electronic form, follows.

SEQUENCE LISTING (841 sequences)

SEQ ID NO: 1 - protein, 565 aa, Influenza A/Puerto Rico/8/34 HA
MKANLLVLLSALAAADADTICIGYHANNSTDTVDTVLEKNVTVTHSVNLLEDSHNGKLCRLKGIAPLQLGKCNIAGWLLGNPECDPLLPVRSWSYIVETPNSENGICYPGDFIDYEELREQLSSVSSFERFEIFPKESSWPNHNTNGVTAACSHEGKSSFYRNLLWLTEKEGSYPKLKNSYVNKKGKEVLVLWGIHHPPNSKEQQNLYQNENAYVSVVTSNYNRRFTPEIAERPKVRDQAGRMNYYWTLLKPGDTIIFEANGNLIAPMYAFALSRGFGSGIITSNASMHECNTKCQTPLGAINSSLPYQNIHPVTIGECPKYVRSAKLRMVTGLRNIPSIQSRGLFGAIAGFIEGGWTGMIDGWYGYHHQNEQGSGYAADQKSTQNAINGITNKVNTVIEKMNIQFTAVGKEFNKLEKRMENLNKKVDDGFLDIWTYNAELLVLLENERTLDFHDSNVKNLYEKVKSQLKNNAKEIGNGCFEFYHKCDNECMESVRNGTYDYPKYSEESKLNREKVDGVKLESMGIYQILAIYSTVASSLVLLVSLGAISFWMCSNGSLQCRICI

SEQ ID NO: 2 - protein, 564 aa, Influenza A/Vietnam/1203/2004 HA
MEKIVLLFAIVSLVKSDQICIGYHANNSTEQVDTIMEKNVTVTHAQDILEKKHNGKLCDLDGVKPLILRDCSVAGWLLGNPMCDEFINVPEWSYIVEKANPVNDLCYPGDFNDYEELKHLLSRINHFEKIQIIPKSSWSSHEASLGVSSACPYQGKSSFFRNVVWLIKKNSTYPTIKRSYNNTNQEDLLVLWGIHHPNDAAEQTKLYQNPTTYISVGTSTLNQRLVPRIATRSKVNGQSGRMEFFWTILKPNDAINFESNGNFIAPEYAYKIVKKGDSTIMKSELEYGNCNTKCQTPMGAINSSMPFHNIHPLTIGECPKYVKSNRLVLATGLRNSPQRERRRKKRGLFGAIAGFIEGGWQGMVDGWYGYHHSNEQGSGYAADKESTQKAIDGVTNKVNSIIDKMNTQFEAVGREFNNLERRIENLNKKMEDGFLDVWTYNAELLVLMENERTLDFHDSNVKNLYDKVRLQLRDNAKELGNGCFEFYHKCDNECMESVRNGTDYPQYSEEARLKREEISGVKLESIGIYQILSIYSTVASSLALAIMVAGLSLWMCSNGSLQCR

SEQ ID NO: 3 - protein, 568 aa, Influenza A/Indonesia/5/2005 HA
MEKIVLLLAIVSLVKSDQICIGYHANNSTEQVDTIMEKNVTVTHAQDILEKTHNGKLCDLDGVKPLILRDCSVAGWLLGNPMCDEFINVPEWSYIVEKANPTNDLCYPGSFNDYEELKHLLSRINHFEKIQIIPKSSWSDHEASSGVSSACPYLGSPSFFRNVVWLIKKNSTYPTIKKSYNNTNQEDLLVLWGIHHPNDAAEQTRLYQNPTTYISIGTSTLNQRLVPKIATRSKVNGQSGRMEFFWTILKPNDAINFESNGNFIAPEYAYKIVKKGDSAIMKSELEYGNCNTKCQTPMGAINSSMPFHNIHPLTIGECPKYVKSNRLVLATGLRNSPQRESRRKKRGLFGAIAGFIEGGWQGMVDGWYGYHHSNEQGSGYAADKESTQKAIDGVTNKVNSIIDKMNTQFEAVGREFNNLERRIENLNKKMEDGFLDVWTYNAELLVLMENERTLDFHDSNVKNLYDKVRLQLRDNAKELGNGCFEFYHKCDNECMESIRNGTYNYPQYSEEARLKREEISGVKLESIGTYQILSIYSTVASSLALAIMMAGLSLWMCSNGSLQCRICI

SEQ ID NO: 4 - protein, 565 aa, Influenza A/NewCaledonia/20/1999
MKAKLLVLLCTFTATYADTICIGYHANNSTDTVDTVLEKNVTVTHSVNLLEDSHNGKLCLLKGIAPLQLGNCSVAGWILGNPECELLISKESWSYIVETPNPENGTCYPGYFADYEELREQLSSVSSFERFEIFPKESSWPNHTVTGVSASCSHNGKSSFYRNLLWLTGKNGLYPNLSKSYVNNKEKEVLVLWGVHHPPNIGNQRALYHTENAYVSVVSSHYSRRFTPEIAKRPKVRDQEGRINYYWTLLEPGDTIIFEANGNLIAPWYAFALSRGFGSGIITSNAPMDECDAKCQTPQGAINSSLPFQNVHPVTIGECPKYVRSAKLRMVTGLRNIPSIQSRGLFGAIAGFIEGGWTGMVDGWYGYHHQNEQGSGYAADQKSTQNAINGITNKVNSVIEKMNTQFTAVGKEFNKLERRMENLNKKVDDGFLDIWTYNAELLVLLENERTLDFHDSNVKNLYEKVKSQLKNNAKEIGNGCFEFYHKCNNECMESVKNGTYDYPKYSEESKLNREKIDGVKLESMGVYQILAIYSTVASSLVLLVSLGAISFWMCSNGSLQCRICI

SEQ ID NO: 5 - protein, 566 aa, Influenza A/South Carolina/1/18HA
MEARLLVLLCAFAATNADTICIGYHANNSTDTVDTVLEKNVTVTHSVNLLEDSHNGKLCKLKGIAPLQLGKCNIAGWLLGNPECDLLLTASSWSYIVETSNSENGTCYPGDFIDYEELREQLSSVSSFEKFEIFPKTSSWPNHETTKGVTAACSYAGASSFYRNLLWLTKKGSSYPKLSKSYVNNKGKEVLVLWGVHHPPTGTDQQSLYQNADAYVSVGSSKYNRRFTPEIAARPKVRDQAGRMNYYWTLLEPGDTITFEATGNLIAPWYAFALNRGSGSGIITSDAPVHDCNTKCQTPHGAINSSLPFQNIHPVTIGECPKYVRSTKLRMATGLRNIPSIQSRGLFGAIAGFIEGGWTGMIDGWYGYHHQNEQGSGYAADQKSTQNAIDGITNKVNSVIEKMNTQFTAVGKEFNNLERRIENLNKKVDDGFLDIWTYNAELLVLLENERTLDFHDSNVRNLYEKVKSQLKNNAKEIGNGCFEFYHKCDDACMESVRNGTYDYPKYSEESKLNREEIDGVKLESMGVYQILAIYSTVASSLVLLVSLGAISFWMCSNGSLQCRICI

SEQ ID NO: 6 - protein, 329 aa, Influenza A/Wisconsin/67/2005 HA
QKLPGNDNSTATLCLGHHAVPNGTIVKTITNDQIEVTNATELVQSSSTGGICDSPHQILDGENCTLIDALLGDPQCDGFQNKKWDLFVERSKAYSNCYPYDVPDYASLRSLVASSGTLEFNDESFNWTGVTQNGTSSACKRRSNNSFFSRLNWLTHLKFKYPALNVTMPNNEKFDKLYIWGVHHPGTDNDQIFLHAQASGRITVSTKRSQQTVIPNIGSRPRIRNIPSRISIYWTIVKPGDILLINSTGNLIAPRGYFKIRSGKSSIMRSDAPIGKCNSECITPNGSIPNDKPFQNVNRITYGACPRYVKQNTLKLATGMRNVPEKQTR

SEQ ID NO: 7 - protein, 328 aa, Influenza A/X31 subtype H3N2 HA
QDLPGNDNSTATLCLGHHAVPNGTLVKTITDDQIEVTNATELVQSSSTGKICNNPHRILDGIDCTLIDALLGDPHCDVFQNETWDLFVERSKAFSNCYPYDVPDYASLRSLVASSGTLEFITEGFTWTGVIQNGGSNACKRGPGSGFFSRLNWLTKSGSTYPVLNVTMPNNDNFDKLYIWGIHHPSTNQEQTSLYVQASGRVTVSTRRSQQTIIPNIGSRPWVRGLSSRISIYWTIVKPGDVLVINSNGNLIAPRGYFKMRTGKSSIMRSDAPIDTCISECITPNGSIPNDKPFQNVNKITYGACPKYVKQNTLKLATGMRNVPEKQT

SEQ ID NO: 8 - protein, 272 aa, Artificial Sequence
  PR/8 HA1-1
SHNGKLCRLKGIAPLQLGKCNIAGWLLGNPECDPLLPVRSWSYIVETPNSENGICYPGDFIDYEELREQLSSVSSFERFEIFPKESSWPNHNTNGVTAACSHEGKSSFYRNLLWLTEKEGSYPKLKNSYVNKKGKEVLVLWGIHHPPNSKEQQNLYQNENAYVSVVTSNYNRRFTPEIAERPKVRDQAGRMNYYWTLLKPGDTIIFEANGNLIAPMYAFALSRGFGSGIITSNASMHECNTKCQTPLGAINSSLPYQNIHPVTIGECPKYVR

SEQ ID NO: 9 - protein, 223 aa, Artificial Sequence
  PR/8 HA1-2
KGIAPLQLGKCNIAGWLLGNPECDPLLPVRSWSYIVETPNSENGICYPGDFIDYEELREQLSSVSSFERFEIFPKESSWPNHNTNGVTAACSHEGKSSFYRNLLWLTEKEGSYPKLKNSYVNKKGKEVLVLWGIHHPPNSKEQQNLYQNENAYVSVVTSNYNRRFTPEIAERPKVRDQAGRMNYYWTLLKPGDTIIFEANGNLIAPMYAFALSRGFGSGIITS

SEQ ID NO: 10 - protein, 176 aa, Artificial Sequence
  PR/8 HA1-3
NSENGICYPGDFIDYEELREQLSSVSSFERFEIFPKESSWPNHNTNGVTAACSHEGKSSFYRNLLWLTEKEGSYPKLKNSYVNKKGKEVLVLWGIHHPPNSKEQQNLYQNENAYVSVVTSNYNRRFTPEIAERPKVRDQAGRMNYYWTLLKPGDTIIFEANGNLIAPMYAFALSRG

SEQ ID NO: 11 - protein, 274 aa, Artificial Sequence
  VN HA1-1
EKKHNGKLCDLDGVKPLILRDCSVAGWLLGNPMCDEFINVPEWSYIVEKANPVNDLCYPGDFNDYEELKHLLSRINHFEKIQIIPKSSWSSHEASLGVSSACPYQGKSSFFRNVVWLIKKNSTYPTIKRSYNNTNQEDLLVLWGIHHPNDAAEQTKLYQNPTTYISVGTSTLNQRLVPRIATRSKVNGQSGRMEFFWTILKPNDAINFESNGNFIAPEYAYKIVKKGDSTIMKSELEYGNCNTKCQTPMGAINSSMPFHNIHPLTIGECPKYVK

SEQ ID NO: 12 - protein, 223 aa, Artificial Sequence
  VN HA1-2
GVKPLILRDCSVAGWLLGNPMCDEFINVPEWSYIVEKANPVNDLCYPGDFNDYEELKHLLSRINHFEKIQIIPKSSWSSHEASLGVSSACPYQGKSSFFRNVVWLIKKNSTYPTIKRSYNNTNQEDLLVLWGIHHPNDAAEQTKLYQNPTTYISVGTSTLNQRLVPRIATRSKVNGQSGRMEFFWTILKPNDAINFESNGNFIAPEYAYKIVKKGDSTIMKSE

SEQ ID NO: 13 - protein, 174 aa, Artificial Sequence
  VN HA1-3
NDLCYPGDFNDYEELKHLLSRINHFEKIQIIPKSSWSSHEASLGVSSACPYQGKSSFFRNVVWLIKKNSTYPTIKRSYNNTNQEDLLVLWGIHHPNDAAEQTKLYQNPTTYISVGTSTLNQRLVPRIATRSKVNGQSGRMEFFWTILKPNDAINFESNGNFIAPEYAYKIVKKG

SEQ ID NO: 14 - protein, 274 aa, Artificial Sequence
  IND HA1-1
EKTHNGKLCDLDGVKPLILRDCSVAGWLLGNPMCDEFINVPEWSYIVEKANPTNDLCYPGSFNDYEELKHLLSRINHFEKIQIIPKSSWSDHEASSGVSSACPYLGSPSFFRNVVWLIKKNSTYPTIKKSYNNTNQEDLLVLWGIHHPNDAAEQTRLYQNPTTYISIGTSTLNQRLVPKIATRSKVNGQSGRMEFFWTILKPNDAINFESNGNFIAPEYAYKIVKKGDSAIMKSELEYGNCNTKCQTPMGAINSSMPFHNIHPLTIGECPKYVK

SEQ ID NO: 15 - protein, 223 aa, Artificial Sequence
  IND HA1-2
GVKPLILRDCSVAGWLLGNPMCDEFINVPEWSYIVEKANPTNDLCYPGSFNDYEELKHLLSRINHFEKIQIIPKSSWSDHEASSGVSSACPYLGSPSFFRNVVWLIKKNSTYPTIKKSYNNTNQEDLLVLWGIHHPNDAAEQTRLYQNPTTYISIGTSTLNQRLVPKIATRSKVNGQSGRMEFFWTILKPNDAINFESNGNFIAPEYAYKIVKKGDSAIMKSE

SEQ ID NO: 16 - protein, 174 aa, Artificial Sequence
  IND HA1-3
NDLCYPGSFNDYEELKHLLSRINHFEKIQIIPKSSWSDHEASSGVSSACPYLGSPSFFRNVVWLIKKNSTYPTIKKSYNNTNQEDLLVLWGIHHPNDAAEQTRLYQNPTTYISIGTSTLNQRLVPKIATRSKVNGQSGRMEFFWTILKPNDAINFESNGNFIAPEYAYKIVKKG

SEQ ID NO: 17 - protein, 272 aa, Artificial Sequence
  NC HA1-1
SHNGKLCLLKGIAPLQLGNCSVAGWILGNPECELLISKESWSYIVETPNPENGTCYPGYFADYEELREQLSSVSSFERFEIFPKESSWPNHTVTGVSASCSHNGKSSFYRNLLWLTGKNGLYPNLSKSYVNNKEKEVLVLWGVHHPPNIGNQRALYHTENAYVSVVSSHYSRRFTPEIAKRPKVRDQEGRINYYWTLLEPGDTIIFEANGNLIAPWYAFALSRGFGSGIITSNAPMDECDAKCQTPQGAINSSLPFQNVHPVTIGECPKYVR

SEQ ID NO: 18 - protein, 223 aa, Artificial Sequence
  NC HA1-2
KGIAPLQLGNCSVAGWILGNPECELLISKESWSYIVETPNPENGTCYPGYFADYEELREQLSSVSSFERFEIFPKESSWPNHTVTGVSASCSHNGKSSFYRNLLWLTGKNGLYPNLSKSYVNNKEKEVLVLWGVHHPPNIGNQRALYHTENAYVSVVSSHYSRRFTPEIAKRPKVRDQEGRINYYWTLLEPGDTIIFEANGNLIAPWYAFALSRGFGSGIITS

SEQ ID NO: 19 - protein, 176 aa, Artificial Sequence
  NC HA1-3
NPENGTCYPGYFADYEELREQLSSVSSFERFEIFPKESSWPNHTVTGVSASCSHNGKSSFYRNLLWLTGKNGLYPNLSKSYVNNKEKEVLVLWGVHHPPNIGNQRALYHTENAYVSVVSSHYSRRFTPEIAKRPKVRDQEGRINYYWTLLEPGDTIIFEANGNLIAPWYAFALSRG

SEQ ID NO: 20 - protein, 267 aa, Artificial Sequence
  WIS HA1-1
QSSSTGGICDSPHQILDGENCTLIDALLGDPQCDGFQNKKWDLFVERSKAYSNCYPYDVPDYASLRSLVASSGTLEFNDESFNWTGVTQNGTSSACKRRSNNSFFSRLNWLTHLKFKYPALNVTMPNNEKFDKLYIWGVHHPGTDNDQIFLHAQASGRITVSTKRSQQTVIPNIGSRPRIRNIPSRISIYWTIVKPGDILLINSTGNLIAPRGYFKIRSGKSSIMRSDAPIGKCNSECITPNGSIPNDKPFQNVNRITYGACPRYVK

SEQ ID NO: 21 - protein, 218 aa, Artificial Sequence
  WIS HA1-2
SPHQILDGENCTLIDALLGDPQCDGFQNKKWDLFVERSKAYSNCYPYDVPDYASLRSLVASSGTLEFNDESFNWTGVTQNGTSSACKRRSNNSFFSRLNWLTHLKFKYPALNVTMPNNEKFDKLYIWGVHHPGTDNDQIFLHAQASGRITVSTKRSQQTVIPNIGSRPRIRNIPSRISIYWTIVKPGDILLINSTGNLIAPRGYFKIRSGKSSIMRSD

SEQ ID NO: 22 - protein, 169 aa, Artificial Sequence
  WIS HA1-3
SNCYPYDVPDYASLRSLVASSGTLEFNDESFNWTGVTQNGTSSACKRRSNNSFFSRLNWLTHLKFKYPALNVTMPNNEKFDKLYIWGVHHPGTDNDQIFLHAQASGRITVSTKRSQQTVIPNIGSRPRIRNIPSRISIYWTIVKPGDILLINSTGNLIAPRGYFKIRSG

SEQ ID NO: 23 - protein, 511 aa, Influenza A/Puerto Rico/8/34 HA0s
DTICIGYHANNSTDTVDTVLEKNVTVTHSVNLLEDSHNGKLCRLKGIAPLQLGKCNIAGWLLGNPECDPLLPVRSWSYIVETPNSENGICYPGDFIDYEELREQLSSVSSFERFEIFPKESSWPNHNTNGVTAACSHEGKSSFYRNLLWLTEKEGSYPKLKNSYVNKKGKEVLVLWGIHHPPNSKEQQNLYQNENAYVSVVTSNYNRRFTPEIAERPKVRDQAGRMNYYWTLLKPGDTIIFEANGNLIAPMYAFALSRGFGSGIITSNASMHECNTKCQTPLGAINSSLPYQNIHPVTIGECPKYVRSAKLRMVTGLRNIPSIQSRGLFGAIAGFIEGGWTGMIDGWYGYHHQNEQGSGYAADQKSTQNAINGITNKVNTVIEKMNIQFTAVGKEFNKLEKRMENLNKKVDDGFLDIWTYNAELLVLLENERTLDFHDSNVKNLYEKVKSQLKNNAKEIGNGCFEFYHKCDNECMESVRNGTYDYPKYSEESKLNREKVDGVKLESMGIYQ

SEQ ID NO: 24 - protein, 223 aa, Artificial Sequence
  PR/8 HA1-2mut
KGAAPLQLGKCNIAGWLLGNPECDPLLPVRSWSDIAETPNSENGICYPGDFIDYEELREQLSSVSSFERFEIFPKESSWPNHNTNGVTAACSHEGKSSFYRNLLWLTEKEGSYPKLKNSYVNKKGKEVLVLWGIHHPPNSKEQQNLYQNENAYVSVVTSNYNRRFTPEIAERPKVRDQAGRMNYYWTLLKPGDTIIFEANGNLIAPMYAFALSRGFGSGIITS

SEQ ID NO: 25 - protein, 176 aa, Artificial Sequence
  PR/8 HA1-3mut
NSENEICYPGDFIDKEELREQLSSVSSFERFEIFPKESSWPNHNTNGVTAACSHEGKSSFYRNLLWLTEKEGSYPKLKNSYVNKKGKEVLVLWGIHHPPNSKEQQNLYQNENAYVSVVTSNYNRRFTPEIAERPKVRDQAGRMNYYWTLLKPGDTIIFEANGNLIAPMYAAALSRG

SEQ ID NO: 26 - protein, 223 aa, Artificial Sequence
  VN HA1-2mut
GAKPLSLRDCSVAGWLLGNPMCDEFINVPEWSDIAEKANPVNDLCYPGDFNDYEELKHLLSRINHFEKIQIIPKSSWSSHEASLGVSSACPYQGKSSFFRNVVWLIKKNSTYPTIKRSYNNTNQEDLLVLWGIHHPNDAAEQTKLYQNPTTYISVGTSTLNQRLVPRIATRSKVNGQSGRMEFFWTILKPNDAINFESNGNFIAPEYAYKIVKKGDSTIMKSE

SEQ ID NO: 27 - protein, 174 aa, Artificial Sequence
  VN HA1-3mut
NDLCYPGDFNDKEELKHLLSRINHFEKIQIIPKSSWSSHEASLGVSSACPYQGKSSFFRNVVWLIKKNSTYPTIKRSYNNTNQEDLLVLWGIHHPNDAAEQTKLYQNPTTYISVGTSTLNQRLVPRIATRSKVNGQSGRMEFFWTILKPNDAINFESNGNFIAPEYAYKIAKKG

SEQ ID NO: 28 - protein, 223 aa, Artificial Sequence
  IND HA1-2mut
GAKPLSLRDCSVAGWLLGNPMCDEFINVPEWSDIAEKANPTNDLCYPGSFNDYEELKHLLSRINHFEKIQIIPKSSWSDHEASSGVSSACPYLGSPSFFRNVVWLIKKNSTYPTIKKSYNNTNQEDLLVLWGIHHPNDAAEQTRLYQNPTTYISIGTSTLNQRLVPKIATRSKVNGQSGRMEFFWTILKPNDAINFESNGNFIAPEYAYKIVKKGDSAIMKSE

SEQ ID NO: 29 - protein, 174 aa, Artificial Sequence
  IND HA1-3mut
NDLCYPGSFNDKEELKHLLSRINHFEKIQIIPKSSWSDHEASSGVSSACPYLGSPSFFRNVVWLIKKNSTYPTIKKSYNNTNQEDLLVLWGIHHPNDAAEQTRLYQNPTTYISIGTSTLNQRLVPKIATRSKVNGQSGRMEFFWTILKPNDAINFESNGNFIAPEYAYKIAKKG

SEQ ID NO: 30 - protein, 223 aa, Artificial Sequence
  NC HA1-2mut
KGAAPLQLGNCSVAGWILGNPECELLISKESWSDIAETPNPENGTCYPGYFADYEELREQLSSVSSFERFEIFPKESSWPNHTVTGVSASCSHNGKSSFYRNLLWLTGKNGLYPNLSKSYVNNKEKEVLVLWGVHHPPNIGNQRALYHTENAYVSVVSSHYSRRFTPEIAKRPKVRDQEGRINYYWTLLEPGDTIIFEANGNLIAPWYAFALSRGFGSGIITS

SEQ ID NO: 31 - protein, 176 aa, Artificial Sequence
  NC HA1-3mut
NPENETCYPGYFADKEELREQLSSVSSFERFEIFPKESSWPNHTVTGVSASCSHNGKSSFYRNLLWLTGKNGLYPNLSKSYVNNKEKEVLVLWGVHHPPNIGNQRALYHTENAYVSVVSSHYSRRFTPEIAKRPKVRDQEGRINYYWTLLEPGDTIIFEANGNLIAPWYAAALSRG

SEQ ID NO: 32 - protein, 218 aa, Artificial Sequence
  WIS HA1-2mut
SPHQALDGENCTLIDALLGDPQCDGFQNKKWDDFAERSKAYSNCYPYDVPDYASLRSLVASSGTLEFNDESFNWTGVTQNGTSSACKRRSNNSFFSRLNWLTHLKFKYPALNVTMPNNEKFDKLYIWGVHHPGTDNDQIFLHAQASGRITVSTKRSQQTVIPNIGSRPRIRNIPSRISIYWTIVKPGDILLINSTGNLIAPRGYFKIRSGKSSIMRSD

SEQ ID NO: 33 - protein, 169 aa, Artificial Sequence
  WIS HA1-3mut
SNCYPKDSPDEASLRSLVASSGTDEFNDESFNWTGVTQNGTSSACKRRSNNSFFSRLNWLTHLKFKYPALNVTMPNNEKFDKLYIWGVHHPGTDNDQIFLHAQASGRITVSTKRSQQTVIPNIGSRPRIRNIPSRISIYWTIVKPGDILLINSTGNLIAPRGYFKIRSG

SEQ ID NO: 34 - protein, 320 aa, Influenza A/Swine/Hong Kong/9/98 HA
DKICIGYQSTNSTETVDTLTETNVPVTHAKELLHTEHNGMLCATNLGHPLILDTCTIEGLIYGNPSCDLLLGGREWSYIVERPSAVNGMCYPGNVENLEELRSLFSSASSYQRIQIFPDTIWNVSYSGTSKACSDSFYRSMRWLTQKNNAYPIQDAQYTNNRGKSILFMWGINHPPTDTVQTNLYTRTDTTTSVTTEDINRTFKPVIGPRPLVNGLHGRIDYYWSVLKPGQTLRVRSNGNLIAPWYGHILSGESHGRILKTDLNSGNCVVQCQTERGGLNTTLPFHNVSKYAFGNCPKYVGVKSLKLAVGLRNVPARSSR

SEQ ID NO: 35 - protein, 566 aa, Influenza A//Aichi/2/1968 HA
MKTIIALSYIFCLALGQDLPGNDNSTATLCLGHHAVPNGTLVKTITDDQIEVTNATELVQSSSTGKICNNPHRILDGIDCTLIDALLGDPHCDVFQNETWDLFVERSKAFSNCYPYDVPDYASLRSLVASSGTLEFITEGFTWTGVTQNGGSNACKRGPGSGFFSRLNWLTKSGSTYPVLNVTMPNNDNFDKLYIWGIHHPSTNQEQTSLYVQASGRVTVSTRRSQQTIIPNIGSRPWVRGLSSRISIYWTIVKPGDVLVINSNGNLIAPRGYFKMRTGKSSIMRSDAPIDTCISECITPNGSIPNDKPFQNVNKITYGACPKYVKQNTLKLATGMRNVPEKQTRGLFGAIAGFIENGWEGMIDGWYGFRHQNSEGTGQAADLKSTQAAIDQINGKLNRVIEKTNEKFHQIEKEFSEVEGRIQDLEKYVEDTKIDLWSYNAELLVALENQHTIDLTDSEMNKLFEKTRRQLRENAEEMGNGCFKIYHKCDNACIESIRNGTYDHDVYRDEALNNRFQIKGVELKSGYKDWILWISFAISCFLLCVVLLGFIMWACQRGNIRCNICI

SEQ ID NO: 36 - protein, 584 aa, Influenza B/Lee/40 HA
MKAIIVLLMVVTSNADRICTGITSSNSPHVVKTATQGEVNVTGVIPLTTTPTKSHFANLKGTQTRGKLCPNCFNCTDLDVALGRPKCMGNTPSAKVSILHEVKPATSGCFPIMHDRTKIRQLPNLLRGYENIRLSTSNVINTETAPGGPYKVGTSGSCPNVANGNGFFNTMAWVIPKDNNKTAINPVTVEVPYICSEGEDQITVWGFHSDDKTQMERLYGDSNPQKFTSSANGVTTHYVSQIGGFPNQTEDEGLKQSGRIVVDYMVQKPGKTGTIVYQRGILLPQKVWCASGRSKVIKGSLPLIGEADCLHEKYGGLNKSKPYYTGEHAKAIGNCPIWVKTPLKLANGTKYRPPAKLLKERGFFGAIAGFLEGGWEGMIAGWHGYTSHGAHGVAVAADLKSTQEAINKITKNLNYLSELEVKNLQRLSGAMNELHDEILELDEKVDDLRADTISSQIELAVLLSNEGIINSEDEHLLALERKLKKMLGPSAVEIGNGCFETKHKCNQTCLDRIAAGTFNAGDFSLPTFDSLNITAASLNDDGLDNHTILLYYSTAASSLAVTLMIAIFIVYMVSRDNVSCSICL

SEQ ID NO: 37 - protein, 655 aa, Influenza C/Johannesburg/1/66
MFFSLLLVLGLTEAEKIKICLQKQVNSSFSLHNGFGGNLYATEEKRMFELVKPKAGASVLNQSTWIGFGDSRTDKSNSAFPRSADVSAKTADKFRSLSGGSLMLSMFGPPGKVDYLYQGCGKHKVFYEGVNWSPHAAINCYRKNWTDIKLNFQKNIYELASQSHCMSLVNALDKTIPLQVTAGTAGNCNNSFLKNPALYTQEVKPSENKCGKENLAFFTLPTQFGTYECKLHLVASCYFIYDSKEVYNKRGCDNYFQVIYDSSGKVVGGLDNRVSPYTGNSGDTPTMQCDMLQLKPGRYSVRSSPRFLLMPERSYCFDMKEKGPVTAVQSIWGKGRESDYAVDQACLSTPGCMLIQKQKPYIGEADDHHGDQEMRELLSGLDYEARCISQSGWVNETSPFTEKYLLPPKFGRCPLAAKEESIPKIPDGLLIPTSGTDTTVTKPKSRIFGIDDLIIGLLFVAIVEAGIGGYLLGSRKESGGGVTKESAEKGFEKIGNDIQILKSSINIAIEKLNDRISHDEQAIRDLTLEIENARSEALLGELGIIRALLVGNISIGLQESLWELASEITNRAGDLAVEVSPGCWIIDNNICDQSCQNFIFKFNETAPVPTIPPLDTKIDLQSDPFYWGSSLGLAITATISLAALVISGIAICRTK

SEQ ID NO: 38 - protein, 293 aa, Artificial Sequence
  B/Lee/40 HA1-1
TTTPTKSHFANLKGTQTRGKLCPNCFNCTDLDVALGRPKCMGNTPSAKVSILHEVKPATSGCFPIMHDRTKIRQLPNLLRGYENIRLSTSNVINTETAPGGPYKVGTSGSCPNVANGNGFFNTMAWVIPKDNNKTAINPVTVEVPYICSEGEDQITVWGFHSDDKTQMERLYGDSNPQKFTSSANGVTTHYVSQIGGFPNQTEDEGLKQSGRIVVDYMVQKPGKTGTIVYQRGILLPQKVWCASGRSKVIKGSLPLIGEADCLHEKYGGLNKSKPYYTGEHAKAIGNCPIWVK

SEQ ID NO: 39 - protein, 240 aa, Artificial Sequence
  B/Lee/40 HA1-2
KGTQTRGKLCPNCFNCTDLDVALGRPKCMGNTPSAKVSILHEVKPATSGCFPIMHDRTKIRQLPNLLRGYENIRLSTSNVINTETAPGGPYKVGTSGSCPNVANGNGFFNTMAWVIPKDNNKTAINPVTVEVPYICSEGEDQITVWGFHSDDKTQMERLYGDSNPQKFTSSANGVTTHYVSQIGGFPNQTEDEGLKQSGRIVVDYMVQKPGKTGTIVYQRGILLPQKVWCASGRSKVIKG

SEQ ID NO: 40 - protein, 267 aa, Artificial Sequence
  A/Aichi/2/68 HA1-1
QSSSTGKICNNPHRILDGIDCTLIDALLGDPHCDVFQNETWDLFVERSKAFSNCYPYDVPDYASLRSLVASSGTLEFITEGFTWTGVTQNGGSNACKRGPGSGFFSRLNWLTKSGSTYPVLNVTMPNNDNFDKLYIWGIHHPSTNQEQTSLYVQASGRVTVSTRRSQQTIIPNIGSRPWVRGLSSRISIYWTIVKPGDVLVINSNGNLIAPRGYFKMRTGKSSIMRSDAPIDTCISECITPNGSIPNDKPFQNVNKITYGACPKYVK

SEQ ID NO: 41 - protein, 216 aa, Artificial Sequence
  A/Aichi/2/68 HA1-2
HRILDGIDCTLIDALLGDPHCDVFQNETWDLFVERSKAFSNCYPYDVPDYASLRSLVASSGTLEFITEGFTWTGVTQNGGSNACKRGPGSGFFSRLNWLTKSGSTYPVLNVTMPNNDNFDKLYIWGIHHPSTNQEQTSLYVQASGRVTVSTRRSQQTIIPNIGSRPWVRGLSSRISIYWTIVKPGDVLVINSNGNLIAPRGYFKMRTGKSSIMRSD

SEQ ID NO: 42 - protein, 358 aa, Influenza B/Malaysia/2506/2004 HA
IVLLMVVTSNADRICTGITSSNSPHVVKTATQGEVNVTGVIPLTTTPTKSHFANLKGTETRGKLCPKCLNCTDLDVALGRPKCTGNIPSARVSILHEVRPVTSGCFPIMHDRTKIRQLPNLLRGYEHIRLSTHNVINAENAPGGSYKIGTSGSCPNVTNGNGFFATMAWAVPKNDNNKTATNSLTIEVPYICTEGEDQITVWGFHSDNEAQMAKLYGDSKPQKFTSSANGVTTHYVSQIGGFPNQTEDGGLPQSGRIVVDYMVQKSGKTGTITYQRGILLPQKVWCASGRSKVIKGSLPLIGEADCLHEKYGGLNKSKPYYTGEHAKAIGNCPIWVKTPLKLANGTKYRPPAKLLKER

SEQ ID NO: 43 - protein, 349 aa, Influenza B/Ohio/1/2005 HA
DRICTGITSSNSPHVVKTATQGEVNVTGVIPLTTTPTKSHFANLKGTKTRGKLCPKCLNCTDLDVALGRPKCTGNIPSAEVSILHEVRPVTSGCFPIMHDRTKIRQLPNLLRGYEHIRLSTHNVINAEKAPGGPYKIGTSGSCPNVTNGNGFFATMAWAVPKNDNNKTATNSLTIEVPYICTEGEDQITIWGFHSDSETQMAKLYGDSKPQKFTSSANGVTTHYVSQIGGFPNQTEDGGLPQSGRIVVDYMVQKSGKTGTITYQRGILLPQKVWCASGRSKVIKGSLPLIGEADCLHEKYGGLNKSKPYYTGEHAKAIGNCPIWVKTPLKLANGTKYRPPAKLLKERGF

SEQ ID NO: 44 - protein, 338 aa, Influenza B/Shanghai/361/2002 HA
DRICTGITSSNSPHVVKTATQGEVNVTGVIPLTTTPIKSHFANLKGTRTRGKLCPDCLNCTDLDVALGRPMCVGTTPSAKASILHEVRPVTSGCFPIMHDRTKIRQLPNLLRGYENIRLSTQNVIDAEKALGGPYRLGTSGSCPNATSKSGFFATMAWAVPKDNNKNATNPLTVEVPYICTEGEDQITVWGFHSDDKTQMKNLYGDSNPQKFTSSANGVTTHYVSQIGGFPDQTEDGGLPQSGRIVVDYMVQKPGKTGTIVYQRGVLLPQKVWCASGRSKVIKGSLPLIGEADCLHEKYGGLNKSKPYYTGEHAKAIGHCPIWVKTPLKLANGTKYRP

SEQ ID NO: 45 - protein, 294 aa, Artificial Sequence
  B/Malaysia/2506/2004 HA1-1
TTTPTKSHFANLKGTETRGKLCPKCLNCTDLDVALGRPKCTGNIPSARVSILHEVRPVTSGCFPIMHDRTKIRQLPNLLRGYEHIRLSTHNVINAENAPGGSYKIGTSGSCPNVTNGNGFFATMAWAVPKNDNNKTATNSLTIEVPYICTEGEDQITVWGFHSDNEAQMAKLYGDSKPQKFTSSANGVTTHYVSQIGGFPNQTEDGGLPQSGRIVVDYMVQKSGKTGTITYQRGILLPQKVWCASGRSKVIKGSLPLIGEADCLHEKYGGLNKSKPYYTGEHAKAIGNCPIWVK

SEQ ID NO: 46 - protein, 241 aa, Artificial Sequence
  B/Malaysia/2506/2004 HA1-2
KGTETRGKLCPKCLNCTDLDVALGRPKCTGNIPSARVSILHEVRPVTSGCFPIMHDRTKIRQLPNLLRGYEHIRLSTHNVINAENAPGGSYKIGTSGSCPNVTNGNGFFATMAWAVPKNDNNKTATNSLTIEVPYICTEGEDQITVWGFHSDNEAQMAKLYGDSKPQKFTSSANGVTTHYVSQIGGFPNQTEDGGLPQSGRIVVDYMVQKSGKTGTITYQRGILLPQKVWCASGRSKVIKG

SEQ ID NO: 47 - protein, 294 aa, Artificial Sequence
  B/Ohio/1/2005 HA1-1
TTTPTKSHFANLKGTKTRGKLCPKCLNCTDLDVALGRPKCTGNIPSAEVSILHEVRPVTSGCFPIMHDRTKIRQLPNLLRGYEHIRLSTHNVINAEKAPGGPYKIGTSGSCPNVTNGNGFFATMAWAVPKNDNNKTATNSLTIEVPYICTEGEDQITIWGFHSDSETQMAKLYGDSKPQKFTSSANGVTTHYVSQIGGFPNQTEDGGLPQSGRIVVDYMVQKSGKTGTITYQRGILLPQKVWCASGRSKVIKGSLPLIGEADCLHEKYGGLNKSKPYYTGEHAKAIGNCPIWVK

SEQ ID NO: 48 - protein, 241 aa, Artificial Sequence
  B/Ohio/1/2005 HA1-2
KGTKTRGKLCPKCLNCTDLDVALGRPKCTGNIPSAEVSILHEVRPVTSGCFPIMHDRTKIRQLPNLLRGYEHIRLSTHNVINAEKAPGGPYKIGTSGSCPNVTNGNGFFATMAWAVPKNDNNKTATNSLTIEVPYICTEGEDQITIWGFHSDSETQMAKLYGDSKPQKFTSSANGVTTHYVSQIGGFPNQTEDGGLPQSGRIVVDYMVQKSGKTGTITYQRGILLPQKVWCASGRSKVIKG

SEQ ID NO: 49 - protein, 293 aa, Artificial Sequence
  B/Shanghai/361/2002 HA1-1
TTTPIKSHFANLKGTRTRGKLCPDCLNCTDLDVALGRPMCVGTTPSAKASILHEVRPVTSGCFPIMHDRTKIRQLPNLLRGYENIRLSTQNVIDAEKALGGPYRLGTSGSCPNATSKSGFFATMAWAVPKDNNKNATNPLTVEVPYICTEGEDQITVWGFHSDDKTQMKNLYGDSNPQKFTSSANGVTTHYVSQIGGFPDQTEDGGLPQSGRIVVDYMVQKPGKTGTIVYQRGVLLPQKVWCASGRSKVIKGSLPLIGEADCLHEKYGGLNKSKPYYTGEHAKAIGHCPIWVK

SEQ ID NO: 50 - protein, 240 aa, Artificial Sequence
  B/Shanghai/361/2002 HA1-2
KGTRTRGKLCPDCLNCTDLDVALGRPMCVGTTPSAKASILHEVRPVTSGCFPIMHDRTKIRQLPNLLRGYENIRLSTQNVIDAEKALGGPYRLGTSGSCPNATSKSGFFATMAWAVPKDNNKNATNPLTVEVPYICTEGEDQITVWGFHSDDKTQMKNLYGDSNPQKFTSSANGVTTHYVSQIGGFPDQTEDGGLPQSGRIVVDYMVQKPGKTGTIVYQRGVLLPQKVWCASGRSKVIKG

SEQ ID NO: 51 - DNA, 1518 bp, Artificial Sequence
  Stf2.b1p
atggcacaagtaatcaacactaacagtctgtcgctgctgacccagaataacctgaacaaatcccagtccgcactgggcaccgctatcgagcgtctgtcttctggtctgcgtatcaacagcgcgaaagacgatgcggcaggtcaggcgattgctaaccgtttcaccgcgaacatcaaaggtctgactcaggcttcccgtaacgctaacgacggtatctccattgcgcagaccactgaaggcgcgctgaacgaaatcaacaacaacctgcagcgtgtgcgtgaactggcggttcagtctgctaacagcaccaactcccagtctgacctcgactccatccaggctgaaatcacccagcgcctgaacgaaatcgaccgtgtatccggccagactcagttcaacggcgtgaaagtcctggcgcaggacaacaccctgaccatccaggttggcgccaacgacggtgaaactatcgatatcgatctgaagcagatcaactctcagaccctgggtctggactcactgaacgtgcagaaagcgtatgatgtgaaagatacagcagtaacaacgaaagcttatgccaataatggtactacactggatgtatcgggtcttgatgatgcagctattaaagcggctacgggtggtacgaatggtacggcttctgtaaccggtggtgcggttaaatttgacgcagataataacaagtactttgttactattggtggctttactggtgctgatgccgccaaaaatggcgattatgaagttaacgttgctactgacggtacagtaacccttgcggctggcgcaactaaaaccacaatgcctgctggtgcgacaactaaaacagaagtacaggagttaaaagatacaccggcagttgtttcagcagatgctaaaaatgccttaattgctggcggcgttgacgctaccgatgctaatggcgctgagttggtcaaaatgtcttataccgataaaaatggtaagacaattgaaggcggttatgcgcttaaagctggcgataagtattacgccgcagattacgatgaagcgacaggagcaattaaagctaaaactacaagttatactgctgctgacggcactaccaaaacagcggctaaccaactgggtggcgtagacggtaaaaccgaagtcgttactatcgacggtaaaacctacaatgccagcaaagccgctggtcatgatttcaaagcacaaccagagctggcggaagcagccgctaaaaccaccgaaaacccgctgcagaaaattgatgccgcgctggcgcaggtggatgcgctgcgctctgatctgggtgcggtacaaaaccgtttcaactctgctatcaccaacctgggcaataccgtaaacaatctgtctgaagcgcgtagccgtatcgaagattccgactacgcgaccgaagtttccaacatgtctcgcgcgcagattctgcagcaggccggtacttccgttctggcgcaggctaaccaggtcccgcagaacgtgctgagcctgttacgt

SEQ ID NO: 52 - DNA, 1539 bp, Artificial Sequence
  STF2.SG
atggcacaagtaatcaacactaacagtctgtcgctgctgacccagaataacctgaacaaatcccagtccgcactgggcaccgctatcgagcgtctgtcttctggtctgcgtatcaacagcgcgaaagacgatgcggcaggtcaggcgattgctaaccgtttcaccgcgaacatcaaaggtctgactcaggcttcccgtaacgctaacgacggtatctccattgcgcagaccactgaaggcgcgctgaacgaaatcaacaacaacctgcagcgtgtgcgtgaactggcggttcagtctgctaacagcaccaactcccagtctgacctcgactccatccaggctgaaatcacccagcgcctgaacgaaatcgaccgtgtatccggccagactcagttcaacggcgtgaaagtcctggcgcaggacaacaccctgaccatccaggttggcgccaacgacggtgaaactatcgatatcgatctgaagcagatcaactctcagaccctgggtctggactcactgaacgtgcagaaagcgtatgatgtgaaagatacagcagtaacaacgaaagcttatgccaataatggtactacactggatgtatcgggtcttgatgatgcagctattaaagcggctacgggtggtacgaatggtacggcttctgtaaccggtggtgcggttaaatttgacgcagataataacaagtactttgttactattggtggctttactggtgctgatgccgccaaaaatggcgattatgaagttaacgttgctactgacggtacagtaacccttgcggctggcgcaactaaaaccacaatgcctgctggtgcgacaactaaaacagaagtacaggagttaaaagatacaccggcagttgtttcagcagatgctaaaaatgccttaattgctggcggcgttgacgctaccgatgctaatggcgctgagttggtcaaaatgtcttataccgataaaaatggtaagacaattgaaggcggttatgcgcttaaagctggcgataagtattacgccgcagattacgatgaagcgacaggagcaattaaagctaaaactacaagttatactgctgctgacggcactaccaaaacagcggctaaccaactgggtggcgtagacggtaaaaccgaagtcgttactatcgacggtaaaacctacaatgccagcaaagccgctggtcatgatttcaaagcacaaccagagctggcggaagcagccgctaaaaccaccgaaaacccgctgcagaaaattgatgccgcgctggcgcaggtggatgcgctgcgctctgatctgggtgcggtacaaaaccgtttcaactctgctatcaccaacctgggcaataccgtaaacaatctgtctgaagcgcgtagccgtatcgaagattccgactacgcgaccgaagtttccaacatgtctcgcgcgcagattctgcagcaggccggtacttccgttctggcgcaggctaaccaggtcccgcagaacgtgctgtctctgttacgtagcggcagtggtagcggatcc

SEQ ID NO: 53 - DNA, 2361 bp, Artificial Sequence
  SFT2.HA1-1 PR8
atggcacaagtaatcaacactaacagtctgtcgctgctgacccagaataacctgaacaaatcccagtccgcactgggcaccgctatcgagcgtctgtcttctggtctgcgtatcaacagcgcgaaagacgatgcggcaggtcaggcgattgctaaccgtttcaccgcgaacatcaaaggtctgactcaggcttcccgtaacgctaacgacggtatctccattgcgcagaccactgaaggcgcgctgaacgaaatcaacaacaacctgcagcgtgtgcgtgaactggcggttcagtctgctaacagcaccaactcccagtctgacctcgactccatccaggctgaaatcacccagcgcctgaacgaaatcgaccgtgtatccggccagactcagttcaacggcgtgaaagtcctggcgcaggacaacaccctgaccatccaggttggcgccaacgacggtgaaactatcgatatcgatctgaagcagatcaactctcagaccctgggtctggactcactgaacgtgcagaaagcgtatgatgtgaaagatacagcagtaacaacgaaagcttatgccaataatggtactacactggatgtatcgggtcttgatgatgcagctattaaagcggctacgggtggtacgaatggtacggcttctgtaaccggtggtgcggttaaatttgacgcagataataacaagtactttgttactattggtggctttactggtgctgatgccgccaaaaatggcgattatgaagttaacgttgctactgacggtacagtaacccttgcggctggcgcaactaaaaccacaatgcctgctggtgcgacaactaaaacagaagtacaggagttaaaagatacaccggcagttgtttcagcagatgctaaaaatgccttaattgctggcggcgttgacgctaccgatgctaatggcgctgagttggtcaaaatgtcttataccgataaaaatggtaagacaattgaaggcggttatgcgcttaaagctggcgataagtattacgccgcagattacgatgaagcgacaggagcaattaaagctaaaaccacaagttatactgctgctgacggcactaccaaaacagcggctaaccaactgggtggcgtagacggtaaaaccgaagtcgttactatcgacggtaaaacctacaatgccagcaaagccgctggtcatgatttcaaagcacaaccagagctggcggaagcagccgctaaaaccaccgaaaacccgctgcagaaaattgatgccgcgctggcgcaggtggatgcgctgcgctctgatctgggtgcggtacaaaaccgtttcaactctgctatcaccaacctgggcaataccgtaaacaatctgtctgaagcgcgtagccgtatcgaagattccgactacgcgaccgaagtttccaacatgtctcgcgcgcagattttgcagcaggccggtacttccgttctggcgcaggctaaccaggtcccgcagaacgtgctgtctctgttacgtagcggcagtggtagcggatcctctcataacggtaaactgtgtcgtctgaaaggtattgcaccactgcagctgggcaaatgcaacatcgcgggttggctgctgggtaaccctgaatgtgacccgctgctgccggttcgttcctggagctacattgttgaaaccccgaactccgaaaacggtatctgctacccgggcgactttattgactatgaagaactgcgtgagcagctgtcttccgtgagcagctttgaacgcttcgaaatcttcccgaaggaaagctcctggccgaaccacaacactaacggcgtgacggcggcttgctcccacgaaggcaaatcttccttttatcgtaacctgctgtggctgactgaaaaggaaggttcctacccaaaactgaaaaacagctatgttaacaaaaagggtaaagaagtcctggtgctgtggggcatccaccacccgccgaactccaaggaacagcagaatctgtatcagaacgaaaacgcatacgtttctgtcgttacttccaactataaccgtcgtttcactccggaaatcgcggaacgtccgaaagtacgcgaccaggctggccgtatgaactactactggaccctgctgaaaccgggtgacactattatcttcgaagctaacggtaacctgatcgcaccaatgtacgctttcgcactgtctcgtggtttcggttccggcattatcaccagcaacgcgtctatgcacgaatgcaacacgaaatgtcagacgccgctgggcgcaattaatagcagcctgccgtaccagaacatccacccggtgactatcggcgaatgcccgaagtatgttcgttaatag

SEQ ID NO: 54 - DNA, 2379 bp, Artificial Sequence
  STF2.HA1-1.his PR8
atggcacaagtaatcaacactaacagtctgtcgctgctgacccagaataacctgaacaaatcccagtccgcactgggcaccgctatcgagcgtctgtcttctggtctgcgtatcaacagcgcgaaagacgatgcggcaggtcaggcgattgctaaccgtttcaccgcgaacatcaaaggtctgactcaggcttcccgtaacgctaacgacggtatctccattgcgcagaccactgaaggcgcgctgaacgaaatcaacaacaacctgcagcgtgtgcgtgaactggcggttcagtctgctaacagcaccaactcccagtctgacctcgactccatccaggctgaaatcacccagcgcctgaacgaaatcgaccgtgtatccggccagactcagttcaacggcgtgaaagtcctggcgcaggacaacaccctgaccatccaggttggcgccaacgacggtgaaactatcgatatcgatctgaagcagatcaactctcagaccctgggtctggactcactgaacgtgcagaaagcgtatgatgtgaaagatacagcagtaacaacgaaagcttatgccaataatggtactacactggatgtatcgggtcttgatgatgcagctattaaagcggctacgggtggtacgaatggtacggcttctgtaaccggtggtgcggttaaatttgacgcagataataacaagtactttgttactattggtggctttactggtgctgatgccgccaaaaatggcgattatgaagttaacgttgctactgacggtacagtaacccttgcggctggcgcaactaaaaccacaatgcctgctggtgcgacaactaaaacagaagtacaggagttaaaagatacaccggcagttgtttcagcagatgctaaaaatgccttaattgctggcggcgttgacgctaccgatgctaatggcgctgagttggtcaaaatgtcttataccgataaaaatggtaagacaattgaaggcggttatgcgcttaaagctggcgataagtattacgccgcagattacgatgaagcgacaggagcaattaaagctaaaaccacaagttatactgctgctgacggcactaccaaaacagcggctaaccaactgggtggcgtagacggtaaaaccgaagtcgttactatcgacggtaaaacctacaatgccagcaaagccgctggtcatgatttcaaagcacaaccagagctggcggaagcagccgctaaaaccaccgaaaacccgctgcaaaaaattgatgccgcgctggcgcaggtggatgcgctgcgctctgatctgggtgcggtacaaaaccgtttcaactctgctatcaccaacctgggcaataccgtaaacaatctgtctgaagcgcgtagccgtatcgaagattccgactacgcgaccgaagtttccaacatgtctcgcgcgcagattttgcagcaggccggtacttccgttctggcgcaggctaaccaggtcccgcagaacgtgctgtctctgttacgtagcggcagtggtagcggatcctctcataacggtaaactgtgtcgtctgaaaggtattgcaccactgcagctgggcaaatgcaacatcgcgggttggctgctgggtaaccctgaatgtgacccgctgctgccggttcgttcctggagctacattgttgaaaccccgaactccgaaaacggtatctgctacccgggcgactttattgactatgaagaactgcgtgagcagctgtcttccgtgagcagctttgaacgcttcgaaatcttcccgaaggaaagctcctggccgaaccacaacactaacggcgtgacggcggcttgctcccacgaaggcaaatcttccttttatcgtaacctgctgtggctgactgaaaaggaaggttcctacccaaaactgaaaaacagctatgttaacaaaaagggtaaagaagtcctggtgctgtggggcatccaccacccgccgaactccaaggaacagcagaatctgtatcagaacgaaaacgcatacgtttctgtcgttacttccaactataaccgtcgtttcactccggaaatcgcggaacgtccgaaagtacgcgaccaggctggccgtatgaactactactggaccctgctgaaaccgggtgacactattatcttcgaagctaacggtaacctgatcgcaccaatgtacgctttcgcactgtctcgtggtttcggttccggcattatcaccagcaacgcgtctatgcacgaatgcaacacgaaatgtcagacgccgctgggcgcaattaatagcagcctgccgtaccagaacatccacccggtgactatcggcgaatgcccgaagtatgttcgtcatcaccatcatcaccattaatag

SEQ ID NO: 55 - DNA, 2214 bp, Artificial Sequence
  STF2.HA1-2 PR8
atggcacaagtaatcaacactaacagtctgtcgctgctgacccagaataacctgaacaaatcccagtccgcactgggcaccgctatcgagcgtctgtcttctggtctgcgtatcaacagcgcgaaagacgatgcggcaggtcaggcgattgctaaccgtttcaccgcgaacatcaaaggtctgactcaggcttcccgtaacgctaacgacggtatctccattgcgcagaccactgaaggcgcgctgaacgaaatcaacaacaacctgcagcgtgtgcgtgaactggcggttcagtctgctaacagcaccaactcccagtctgacctcgactccatccaggctgaaatcacccagcgcctgaacgaaatcgaccgtgtatccggccagactcagttcaacggcgtgaaagtcctggcgcaggacaacaccctgaccatccaggttggcgccaacgacggtgaaactatcgatatcgatctgaagcagatcaactctcagaccctgggtctggactcactgaacgtgcagaaagcgtatgatgtgaaagatacagcagtaacaacgaaagcttatgccaataatggtactacactggatgtatcgggtcttgatgatgcagctattaaagcggctacgggtggtacgaatggtacggcttctgtaaccggtggtgcggttaaatttgacgcagataataacaagtactttgttactattggtggctttactggtgctgatgccgccaaaaatggcgattatgaagttaacgttgctactgacggtacagtaacccttgcggctggcgcaactaaaaccacaatgcctgctggtgcgacaactaaaacagaagtacaggagttaaaagatacaccggcagttgtttcagcagatgctaaaaatgccttaattgctggcggcgttgacgctaccgatgctaatggcgctgagttggtcaaaatgtcttataccgataaaaatggtaagacaattgaaggcggttatgcgcttaaagctggcgataagtattacgccgcagattacgatgaagcgacaggagcaattaaagctaaaactacaagttatactgctgctgacggcactaccaaaacagcggctaaccaactgggtggcgtagacggtaaaaccgaagtcgttactatcgacggtaaaacctacaatgccagcaaagccgctggtcatgatttcaaagcacaaccagagctggcggaagcagccgctaaaaccaccgaaaacccgctgcagaaaattgatgccgcgctggcgcaggtggatgcgctgcgctctgatctgggtgcggtacaaaaccgtttcaactctgctatcaccaacctgggcaataccgtaaacaatctgtctgaagcgcgtagccgtatcgaagattccgactacgcgaccgaagtttccaacatgtctcgcgcgcagattctgcagcaggccggtacttccgttctggcgcaggctaaccaggtcccgcagaacgtgctgtctctgttacgttctggttctggttctggttctaaaggtattgctccactgcaactgggtaaatgcaatattgcgggttggctgctgggcaacccggaatgcgatccgctgctgccggtccgttcctggagctatattgttgaaactccgaactctgagaacggcatctgctatccaggtgatttcattgactatgaggaactgcgtgaacaactgtcttccgtgtcttcctttgaacgtttcgagatttttcctaaagaatcttcttggccgaaccataacactaatggtgttaccgctgcgtgctctcatgaaggtaaatctagcttttaccgcaacctgctgtggctgaccgagaaagaaggttcttacccgaaactgaaaaacagctacgtaaacaaaaagggcaaggaagttctggtcctgtggggtatccaccatccgccgaacagcaaggaacagcagaatctgtatcagaacgaaaacgcatacgtatctgttgttacttctaactacaaccgccgtttcacccctgaaatcgcggaacgtccgaaagtgcgtgaccaggcaggccgcatgaactattactggaccctgctgaagccgggtgatactatcatcttcgaagcgaacggtaacctgatcgccccgatgtacgcgttcgctctgagccgtggcttcggctctggtatcattacgtcttaataa

SEQ ID NO: 56 - DNA, 2214 bp, Artificial Sequence
  STF2.HA1-2mut PR8
atggcacaagtaatcaacactaacagtctgtcgctgctgacccagaataacctgaacaaatcccagtccgcactgggcaccgctatcgagcgtctgtcttctggtctgcgtatcaacagcgcgaaagacgatgcggcaggtcaggcgattgctaaccgtttcaccgcgaacatcaaaggtctgactcaggcttcccgtaacgctaacgacggtatctccattgcgcagaccactgaaggcgcgctgaacgaaatcaacaacaacctgcagcgtgtgcgtgaactggcggttcagtctgctaacagcaccaactcccagtctgacctcgactccatccaggctgaaatcacccagcgcctgaacgaaatcgaccgtgtatccggccagactcagttcaacggcgtgaaagtcctggcgcaggacaacaccctgaccatccaggttggcgccaacgacggtgaaactatcgatatcgatctgaagcagatcaactctcagaccctgggtctggactcactgaacgtgcagaaagcgtatgatgtgaaagatacagcagtaacaacgaaagcttatgccaataatggtactacactggatgtatcgggtcttgatgatgcagctattaaagcggctacgggtggtacgaatggtacggcttctgtaaccggtggtgcggttaaatttgacgcagataataacaagtactttgttactattggtggctttactggtgctgatgccgccaaaaatggcgattatgaagttaacgttgctactgacggtacagtaacccttgcggctggcgcaactaaaaccacaatgcctgctggtgcgacaactaaaacagaagtacaggagttaaaagatacaccggcagttgtttcagcagatgctaaaaatgccttaattgctggcggcgttgacgctaccgatgctaatggcgctgagttggtcaaaatgtcttataccgataaaaatggtaagacaattgaaggcggttatgcgcttaaagctggcgataagtattacgccgcagattacgatgaagcgacaggagcaattaaagctaaaaccacaagttatactgctgctgacggcactaccaaaacagcggctaaccaactgggtggcgtagacggtaaaaccgaagtcgttactatcgacggtaaaacctacaatgccagcaaagccgctggtcatgatttcaaagcacaaccagagctggcggaagcagccgctaaaaccaccgaaaacccgctgcagaaaattgatgccgcgctggcgcaggtggatgcgctgcgctctgatctgggtgcggtacaaaaccgtttcaactctgctatcaccaacctgggcaataccgtaaacaatctgtctgaagcgcgtagccgtatcgaagattccgactacgcgaccgaagtttccaacatgtctcgcgcgcagattttgcagcaggccggtacttccgttctggcgcaggctaaccaggtcccgcagaacgtgctgtctctgttagcgagcggcagtggtagcggatccaaaggtgcggctccactgcaactgggtaaatgcaatattgcgggttggctgctgggcaacccggaatgcgatccgctgctgccggtccgttcctggagcgatattgcggaaactccgaactctgagaacggcatctgctatccaggtgatttcattgactatgaggaactgcgtgaacaactgtcttccgtgtcttcctttgaacgtttcgagatttttcctaaagaatcttcttggccgaaccataacactaatggtgttaccgctgcgtgctctcatgaaggtaaatctagcttttaccgcaacctgctgtggctgaccgagaaagaaggttcttacccgaaactgaaaaacagctacgtaaacaaaaagggcaaggaagttctggtcctgtggggtatccaccatccgccgaacagcaaggaacagcagaatctgtatcagaacgaaaacgcatacgtatctgttgttacttctaactacaaccgccgtttcacccctgaaatcgcggaacgtccgaaagtgcgtgaccaggcaggccgcatgaactattactggaccctgctgaagccgggtgatactatcatcttcgaagcgaacggtaacctgatcgccccgatgtacgcgttcgctctgagccgtggcttcggctctggtatcattacgtcttaataa

SEQ ID NO: 57 - DNA, 2073 bp, Artificial Sequence
  STF2.HA1-3 PR8
atggcacaagtaatcaacactaacagtctgtcgctgctgacccagaataacctgaacaaatcccagtccgcactgggcaccgctatcgagcgtctgtcttctggtctgcgtatcaacagcgcgaaagacgatgcggcaggtcaggcgattgctaaccgtttcaccgcgaacatcaaaggtctgactcaggcttcccgtaacgctaacgacggtatctccattgcgcagaccactgaaggcgcgctgaacgaaatcaacaacaacctgcagcgtgtgcgtgaactggcggttcagtctgctaacagcaccaactcccagtctgacctcgactccatccaggctgaaatcacccagcgcctgaacgaaatcgaccgtgtatccggccagactcagttcaacggcgtgaaagtcctggcgcaggacaacaccctgaccatccaggttggcgccaacgacggtgaaactatcgatatcgatctgaagcagatcaactctcagaccctgggtctggactcactgaacgtgcagaaagcgtatgatgtgaaagatacagcagtaacaacgaaagcttatgccaataatggtactacactggatgtatcgggtcttgatgatgcagctattaaagcggctacgggtggtacgaatggtacggcttctgtaaccggtggtgcggttaaatttgacgcagataataacaagtactttgttactattggtggctttactggtgctgatgccgccaaaaatggcgattatgaagttaacgttgctactgacggtacagtaacccttgcggctggcgcaactaaaaccacaatgcctgctggtgcgacaactaaaacagaagtacaggagttaaaagatacaccggcagttgtttcagcagatgctaaaaatgccttaattgctggcggcgttgacgctaccgatgctaatggcgctgagttggtcaaaatgtcttataccgataaaaatggtaagacaattgaaggcggttatgcgcttaaagctggcgataagtattacgccgcagattacgatgaagcgacaggagcaattaaagctaaaactacaagttatactgctgctgacggcactaccaaaacagcggctaaccaactgggtggcgtagacggtaaaaccgaagtcgttactatcgacggtaaaacctacaatgccagcaaagccgctggtcatgatttcaaagcacaaccagagctggcggaagcagccgctaaaaccaccgaaaacccgctgcagaaaattgatgccgcgctggcgcaggtggatgcgctgcgctctgatctgggtgcggtacaaaaccgtttcaactctgctatcaccaacctgggcaataccgtaaacaatctgtctgaagcgcgtagccgtatcgaagattccgactacgcgaccgaagtttccaacatgtctcgcgcgcagattctgcagcaggccggtacttccgttctggcgcaggctaaccaggtcccgcagaacgtgctgtctctgttacgttctggtagcggttctggctctaactctgaaaatggtatctgttacccgggtgatttcatcgattatgaggaactgcgtgaacagctgtctagcgtgagctcctttgaacgcttcgaaatcttcccgaaggaatctagctggccgaaccataacacgaacggtgtgaccgctgcttgctcccacgaaggtaagagctccttctaccgcaatctgctgtggctgactgaaaaagaaggtagctacccgaaactgaaaaattcttacgtcaacaagaaaggcaaggaagtgctggttctgtggggcattcaccacccaccgaacagcaaagagcaacagaacctgtaccaaaatgagaacgcttacgtttctgttgtgacttctaactacaatcgtcgctttacccctgaaatcgcggagcgtccaaaagtgcgtgaccaggctggtcgtatgaactactattggaccctgctgaaaccgggcgacaccattatctttgaagcgaacggtaacctgatcgcgcctatgtacgcgttcgctctgtctcgtggctaataa

SEQ ID NO: 58 - DNA, 2073 bp, Artificial Sequence
  STF2.HA1-3mut PR8
atggcacaagtaatcaacactaacagtctgtcgctgctgacccagaataacctgaacaaatcccagtccgcactgggcaccgctatcgagcgtctgtcttctggtctgcgtatcaacagcgcgaaagacgatgcggcaggtcaggcgattgctaaccgtttcaccgcgaacatcaaaggtctgactcaggcttcccgtaacgctaacgacggtatctccattgcgcagaccactgaaggcgcgctgaacgaaatcaacaacaacctgcagcgtgtgcgtgaactggcggttcagtctgctaacagcaccaactcccagtctgacctcgactccatccaggctgaaatcacccagcgcctgaacgaaatcgaccgtgtatccggccagactcagttcaacggcgtgaaagtcctggcgcaggacaacaccctgaccatccaggttggcgccaacgacggtgaaactatcgatatcgatctgaagcagatcaactctcagaccctgggtctggactcactgaacgtgcagaaagcgtatgatgtgaaagatacagcagtaacaacgaaagcttatgccaataatggtactacactggatgtatcgggtcttgatgatgcagctattaaagcggctacgggtggtacgaatggtacggcttctgtaaccggtggtgcggttaaatttgacgcagataataacaagtactttgttactattggtggctttactggtgctgatgccgccaaaaatggcgattatgaagttaacgttgctactgacggtacagtaacccttgcggctggcgcaactaaaaccacaatgcctgctggtgcgacaactaaaacagaagtacaggagttaaaagatacaccggcagttgtttcagcagatgctaaaaatgccttaattgctggcggcgttgacgctaccgatgctaatggcgctgagttggtcaaaatgtcttataccgataaaaatggtaagacaattgaaggcggttatgcgcttaaagctggcgataagtattacgccgcagattacgatgaagcgacaggagcaattaaagctaaaactacaagttatactgctgctgacggcactaccaaaacagcggctaaccaactgggtggcgtagacggtaaaaccgaagtcgttactatcgacggtaaaacctacaatgccagcaaagccgctggtcatgatttcaaagcacaaccagagctggcggaagcagccgctaaaaccaccgaaaacccgctgcagaaaattgatgccgcgctggcgcaggtggatgcgctgcgctctgatctgggtgcggtacaaaaccgtttcaactctgctatcaccaacctgggcaataccgtaaacaatctgtctgaagcgcgtagccgtatcgaagattccgactacgcgaccgaagtttccaacatgtctcgcgcgcagattctgcagcaggccggtacttccgttctggcgcaggctaaccaggtcccgcagaacgtgctgtctctgttacgtagcggcagtggtagcggatccaactctgaaaatgaaatctgttacccgggtgatttcatcgataaagaggaactgcgtgaacagctgtctagcgtgagctcctttgaacgcttcgaaatcttcccgaaggaatctagctggccgaaccataacacgaacggtgtgaccgctgcttgctcccacgaaggtaagagctccttctaccgcaatctgctgtggctgactgaaaaagaaggtagctacccgaaactgaaaaattcttacgtcaacaagaaaggcaaggaagtgctggttctgtggggcattcaccacccaccgaacagcaaagagcaacagaacctgtaccaaaatgagaacgcttacgtttctgttgtgacttctaactacaatcgtcgctttacccctgaaatcgcggagcgtccaaaagtgcgtgaccaggctggtcgtatgaactactattggaccctgctgaaaccgggcgacaccattatctttgaagcgaacggtaacctgatcgcgcctatgtacgcggcggctctgtctcgtggctaataa

SEQ ID NO: 59 - DNA, 819 bp, Artificial Sequence
  HA1-1 PR8
atgtctcataacggtaaactgtgtcgtctgaaaggtattgcaccactgcagctgggcaaatgcaacatcgcgggttggctgctgggtaaccctgaatgtgacccgctgctgccggttcgttcctggagctacattgttgaaaccccgaactccgaaaacggtatctgctacccgggcgactttattgactatgaagaactgcgtgagcagctgtcttccgtgagcagctttgaacgcttcgaaatcttcccgaaggaaagctcctggccgaaccacaacactaacggcgtgacggcggcttgctcccacgaaggcaaatcttccttttatcgtaacctgctgtggctgactgaaaaggaaggttcctacccaaaactgaaaaacagctatgttaacaaaaagggtaaagaagtcctggtgctgtggggcatccaccacccgccgaactccaaggaacagcagaatctgtatcagaacgaaaacgcatacgtttctgtcgttacttccaactataaccgtcgtttcactccggaaatcgcggaacgtccgaaagtacgcgaccaggctggccgtatgaactactactggaccctgctgaaaccgggtgacactattatcttcgaagctaacggtaacctgatcgcaccaatgtacgctttcgcactgtctcgtggtttcggttccggcattatcaccagcaacgcgtctatgcacgaatgcaacacgaaatgtcagacgccgctgggcgcaattaatagcagcctgccgtaccagaacatccacccggtgactatcggcgaatgcccgaagtatgttcgt

SEQ ID NO: 60 - DNA, 837 bp, Artificial Sequence
  HA1-1.his PR8
atgtctcataacggtaaactgtgtcgtctgaaaggtattgcaccactgcagctgggcaaatgcaacatcgcgggttggctgctgggtaaccctgaatgtgacccgctgctgccggttcgttcctggagctacattgttgaaaccccgaactccgaaaacggtatctgctacccgggcgactttattgactatgaagaactgcgtgagcagctgtcttccgtgagcagctttgaacgcttcgaaatcttcccgaaggaaagctcctggccgaaccacaacactaacggcgtgacggcggcttgctcccacgaaggcaaatcttccttttatcgtaacctgctgtggctgactgaaaaggaaggttcctacccaaaactgaaaaacagctatgttaacaaaaagggtaaagaagtcctggtgctgtggggcatccaccacccgccgaactccaaggaacagcagaatctgtatcagaacgaaaacgcatacgtttctgtcgttacttccaactataaccgtcgtttcactccggaaatcgcggaacgtccgaaagtacgcgaccaggctggccgtatgaactactactggaccctgctgaaaccgggtgacactattatcttcgaagctaacggtaacctgatcgcaccaatgtacgctttcgcactgtctcgtggtttcggttccggcattatcaccagcaacgcgtctatgcacgaatgcaacacgaaatgtcagacgccgctgggcgcaattaatagcagcctgccgtaccagaacatccacccggtgactatcggcgaatgcccgaagtatgttcgtcatcaccatcatcaccat

SEQ ID NO: 61 - DNA, 690 bp, Artificial Sequence
  HA1-2.his PR8
atgaaaggtattgctccactgcaactgggtaaatgcaatattgcgggttggctgctgggcaacccggaatgcgatccgctgctgccggtccgttcctggagctatattgttgaaactccgaactctgagaacggcatctgctatccaggtgatttcattgactatgaggaactgcgtgaacaactgtcttccgtgtcttcctttgaacgtttcgagatttttcctaaagaatcttcttggccgaaccataacactaatggtgttaccgctgcgtgctctcatgaaggtaaatctagcttttaccgcaacctgctgtggctgaccgagaaagaaggttcttacccgaaactgaaaaacagctacgtaaacaaaaagggcaaggaagttctggtcctgtggggtatccaccatccgccgaacagcaaggaacagcagaatctgtatcagaacgaaaacgcatacgtatctgttgttacttctaactacaaccgccgtttcacccctgaaatcgcggaacgtccgaaagtgcgtgaccaggcaggccgcatgaactattactggaccctgctgaagccgggtgatactatcatcttcgaagcgaacggtaacctgatcgccccgatgtacgcgttcgctctgagccgtggcttcggctctggtatcattacgtctcatcaccatcatcaccat

SEQ ID NO: 62 - DNA, 2304 bp, Artificial Sequence
  CRM.HA1-2
atgggtgctgatgatgtcgttgattcctccaaaagcttcgttatggaaaatttctcttcttatcacggcaccaaaccgggttatgtggattctatccaaaaaggcatccagaaaccgaagtccggtacgcagggtaactatgatgacgattggaaaggtttttactccaccgataataaatatgacgcggctggctactctgttgacaacgaaaatccactgtctggtaaggctggcggtgtcgtaaaggtaacgtatcctggcctgaccaaggtgctggcactgaaggtggataacgctgaaaccatcaaaaaggagctgggcctgagcctgactgaaccgctgatggagcaggtcggtaccgaggaattcatcaaacgcttcggtgatggcgcctcccgtgttgtgctgtccctgccgttcgcagaaggctcttcctctgtcgaatatatcaacaactgggaacaggctaaagctctgagcgtcgaactggaaattaactttgagacccgtggcaagcgtggtcaggacgcgatgtacgaatatatggctcaggcttgtgccggtaaccgtgttcgccgttccgtcggttcctctctgtcttgcatcaacctggattgggacgttatccgtgataagaccaaaaccaaaattgaaagcctgaaggaacacggtccgatcaaaaacaaaatgtctgaatctccgaacaaaaccgtgtccgaggaaaaagcgaaacagtatctggaagaattccaccagactgccctggaacatcctgaactgtccgaactgaagactgtaaccggcactaacccggtgttcgcaggcgcaaactacgccgcgtgggcggtaaacgttgcgcaggttattgatagcgaaaccgcagataacctggaaaaaacgaccgcagctctgtctatcctgccgggtatcggttccgttatgggtattgcggacggcgctgtgcaccacaacacggaagaaatcgtcgcacagtctatcgcgctgtcttctctgatggttgctcaggcaattccactggtaggtgaactggtggacattggctttgcggcgtacaacttcgtcgaaagcattatcaacctgttccaggttgtacacaactcttacaaccgtccggcctacagccctggccacaaaacccaaccgtttctgcacgacggttatgcggtgtcctggaacacggttgaagactctatcattcgtaccggctttcagggcgagtccggccacgatatcaaaattactgcagaaaacactccgctgccgatcgctggcgttctgctgccgaccatcccgggtaagctggatgtgaacaaaagcaaaacccacatctctgttaacggtcgtaaaattcgcatgcgctgtcgtgctatcgacggtgatgttaccttctgccgtccgaaatctccagtctacgtgggcaacggtgttcatgccaacctgcacgtggcgttccatcgtagctctagcgaaaaaatccactccaacgaaatctctagcgattctatcggtgttctgggttatcagaaaacggtggatcatacgaaagtcaattctaaactgagcctgttcttcgaaatcaaatctagcggctctggatccggttccaaaggcatcgcgccgctgcagctgggtaaatgtaacattgcgggctggctgctgggtaatccggaatgcgatccgctgctgccggtccgtagctggtcttacattgttgaaactccgaactctgagaatggcatctgctacccgggcgattttatcgactatgaagaactgcgtgaacagctgtcttccgtttcttcctttgaacgtttcgaaatcttcccgaaagaaagcagctggccgaatcacaatacgaacggtgttactgctgcgtgttctcatgaaggtaaatccagcttctaccgtaacctgctgtggctgaccgaaaaagagggttcttatcctaaactgaaaaacagctacgttaacaaaaagggcaaagaagtgctggtgctgtggggtatccatcaccctccgaactctaaagaacaacagaatctgtatcagaacgaaaacgcttacgtttccgtggtgacctctaactataaccgtcgttttaccccggagattgctgaacgtccgaaagtgcgcgatcaggctggccgtatgaactactattggaccctgctgaaaccgggcgataccatcattttcgaagctaacggcaacctgattgctccgatgtatgcgtttgctctgtctcgtggcttcggctctggtattattacgtcttaataa

SEQ ID NO: 63 - DNA, 1068 bp, Artificial Sequence
  LTB.HA1-2
atgaataaggttaagttctacgtactgtttaccgcgctgctgtcttctctgtgcgcgcatggtgctccgcagtctattactgaactgtgctctgaataccacaacacccagatctatactatcaacgataaaatcctgagctataccgaatctatggcaggcaaacgcgaaatggttatcattacctttaaaagcggcgccacctttcaagtggaagttccgggctctcagcatattgactctcaaaaaaaagcgatcgaacgtatgaaagatactctgcgcattacctacctgaccgaaaccaaaatcgataaactgtgcgtatggaacaataagactcctaactctatcgcagctatttctatggaaaactctggtagcggatccggttctaaaggcatcgcgccgctgcagctgggtaaatgtaacattgcgggctggctgctgggtaatccggaatgcgatccgctgctgccggtccgtagctggtcttacattgttgaaactccgaactctgagaatggcatctgctacccgggcgattttatcgactatgaagaactgcgtgaacagctgtcttccgtttcttcctttgaacgtttcgaaatcttcccgaaagaaagcagctggccgaatcacaatacgaacggtgttactgctgcgtgttctcatgaaggtaaatccagcttctaccgtaacctgctgtggctgaccgaaaaagagggttcttatcctaaactgaaaaacagctacgttaacaaaaagggcaaagaagtgctggtgctgtggggtatccatcaccctccgaactctaaagaacaacagaatctgtatcagaacgaaaacgcttacgtttccgtggtgacctctaactataaccgtcgttttaccccggagattgctgaacgtccgaaagtgcgcgatcaggctggccgtatgaactactattggaccctgctgaaaccgggcgataccatcattttcgaagctaacggcaacctgattgctccgatgtatgcgtttgctctgtctcgtggcttcggctctggtattattacgtcttaataa

SEQ ID NO: 64 - DNA, 2346 bp, Artificial Sequence
  STF2.HA1-1 VN
atggcacaagtaatcaacactaacagtctgtcgctgctgacccagaataacctgaacaaatcccagtccgcactgggcaccgctatcgagcgtctgtcttctggtctgcgtatcaacagcgcgaaagacgatgcggcaggtcaggcgattgctaaccgtttcaccgcgaacatcaaaggtctgactcaggcttcccgtaacgctaacgacggtatctccattgcgcagaccactgaaggcgcgctgaacgaaatcaacaacaacctgcagcgtgtgcgtgaactggcggttcagtctgctaacagcaccaactcccagtctgacctcgactccatccaggctgaaatcacccagcgcctgaacgaaatcgaccgtgtatccggccagactcagttcaacggcgtgaaagtcctggcgcaggacaacaccctgaccatccaggttggcgccaacgacggtgaaactatcgatatcgatctgaagcagatcaactctcagaccctgggtctggactcactgaacgtgcagaaagcgtatgatgtgaaagatacagcagtaacaacgaaagcttatgccaataatggtactacactggatgtatcgggtcttgatgatgcagctattaaagcggctacgggtggtacgaatggtacggcttctgtaaccggtggtgcggttaaatttgacgcagataataacaagtactttgttactattggtggctttactggtgctgatgccgccaaaaatggcgattatgaagttaacgttgctactgacggtacagtaacccttgcggctggcgcaactaaaaccacaatgcctgctggtgcgacaactaaaacagaagtacaggagttaaaagatacaccggcagttgtttcagcagatgctaaaaatgccttaattgctggcggcgttgacgctaccgatgctaatggcgctgagttggtcaaaatgtcttataccgataaaaatggtaagacaattgaaggcggttatgcgcttaaagctggcgataagtattacgccgcagattacgatgaagcgacaggagcaattaaagctaaaaccacaagttatactgctgctgacggcactaccaaaacagcggctaaccaactgggtggcgtagacggtaaaaccgaagtcgttactatcgacggtaaaacctacaatgccagcaaagccgctggtcatgatttcaaagcacaaccagagctggcggaagcagccgctaaaaccaccgaaaacccgctgcagaaaattgatgccgcgctggcgcaggtggatgcgctgcgctctgatctgggtgcggtacaaaaccgtttcaactctgctatcaccaacctgggcaataccgtaaacaatctgtctgaagcgcgtagccgtatcgaagattccgactacgcgaccgaagtttccaacatgtctcgcgcgcagattttgcagcaggccggtacttccgttctggcgcaggctaaccaggtcccgcagaacgtgctgagcctgttagcggagaagaaacacaatggcaaactgtgtgatctggatggtgtgaaaccgctgattctgcgcgattgctctgtggcaggctggctgctgggcaaccctatgtgtgacgaattcattaacgttccggaatggtcttacattgttgaaaaagctaaccctgtcaacgatctgtgttaccctggtgactttaacgattacgaagaactgaagcacctgctgtctcgtatcaatcacttcgagaaaatccagatcatcccgaaatcctcctggagctcccacgaagcttctctgggcgtatcctccgcgtgcccgtaccagggcaaatcctctttctttcgtaacgttgtttggctgatcaagaaaaactccacctacccgacgatcaagcgtagctataataacaccaaccaggaagacctgctggttctgtggggcatccaccatccaaacgatgctgcggaacagaccaagctgtaccagaacccgaccacctacatcagcgtgggcacctctacgctgaaccagcgtctggtaccgcgtatcgcaacccgcagcaaggtaaacggtcaaagcggccgcatggaatttttctggaccatcctgaaaccgaacgacgcaatcaacttcgaatctaacggcaatttcatcgctccggagtatgcgtacaaaatcgtaaagaaaggtgatagcactatcatgaaatccgagctggaatatggcaactgtaacaccaaatgccagaccccgatgggtgcaatcaactcctccatgccgtttcacaacattcacccgctgactatcggcgaatgtccgaaatacgttaaatagtaa

SEQ ID NO: 65 - DNA, 46 bp, Artificial Sequence
  FOR PRIMER
agtggctgagcctgttagcggagaagaaacacaatggcaaactgtg

SEQ ID NO: 66 - DNA, 50 bp, Artificial Sequence
  REV PRIMER
agtcgctcagcttactatttaacgtatttcggacattcgccgatagtcag

SEQ ID NO: 67 - DNA, 1605 bp, Artificial Sequence
  HA0s VN
gtgctgagcctgttacgtcagatttgtatcggctaccacgcaaacaactctaccgagcaagttgataccatcatggagaaaaacgtgaccgttactcacgcgcaggacatcctggagaagaaacacaatggcaaactgtgtgatctggatggtgtgaaaccgctgattctgcgcgattgctctgtggcaggctggctgctgggcaaccctatgtgtgacgaattcattaacgttccggaatggtcttacattgttgaaaaagctaaccctgtcaacgatctgtgttaccctggtgactttaacgattacgaagaactgaagcacctgctgtctcgtatcaatcacttcgagaaaatccagatcatcccgaaatcctcctggagctcccacgaagcttctctgggcgtatcctccgcgtgcccgtaccagggcaaatcctctttctttcgtaacgttgtttggctgatcaagaaaaactccacctacccgacgatcaagcgtagctataataacaccaaccaggaagacctgctggttctgtggggcatccaccatccaaacgatgctgcggaacagaccaagctgtaccagaacccgaccacctacatcagcgtgggcacctctacgctgaaccagcgtctggtaccgcgtatcgcaacccgcagcaaggtaaacggtcaaagcggccgcatggaatttttctggaccatcctgaaaccgaacgacgcaatcaacttcgaatctaacggcaatttcatcgctccggagtatgcgtacaaaatcgtaaagaaaggtgatagcactatcatgaaatccgagctggaatatggcaactgtaacaccaaatgccagaccccgatgggtgcaatcaactcctccatgccgtttcacaacattcacccgctgactatcggcgaatgtccgaaatacgttaaatccaatcgtctggttctggctaccggtctgcgtaactccccacagcgtgaacgtcgtcgtaagaaacgtggtctgtttggcgcgatcgctggtttcatcgagggcggctggcagggtatggttgatggctggtacggttatcatcattccaatgaacagggttccggctacgccgcagataaagaaagcactcagaaagcaattgatggcgtaactaacaaagtaaattctatcattgataaaatgaacacccagttcgaggcggttggtcgtgagttcaacaacctggaacgccgtatcgaaaacctgaacaagaaaatggaagacggttttctggatgtgtggacttacaatgctgaactgctggtgctgatggaaaacgagcgtaccctggacttccacgacagcaacgtcaaaaatctgtatgacaaagtccgtctgcagctgcgtgataacgctaaagagctgggtaatggctgcttcgagttctatcacaaatgcgacaacgaatgcatggaatctgtccgcaacggcacttacgattatccgcagtactccgaagaagcgcgcctgaaacgcgaagagatctccggtgtgaagctggagtctattggcatctaccagatcctgtccatctacagcacctagtaagctgagcgcctacgcagc

SEQ ID NO: 68 - DNA, 2193 bp, Artificial Sequence
  STF2.HA1-2 VN
atggcacaagtaatcaacactaacagtctgtcgctgctgacccagaataacctgaacaaatcccagtccgcactgggcaccgctatcgagcgtctgtcttctggtctgcgtatcaacagcgcgaaagacgatgcggcaggtcaggcgattgctaaccgtttcaccgcgaacatcaaaggtctgactcaggcttcccgtaacgctaacgacggtatctccattgcgcagaccactgaaggcgcgctgaacgaaatcaacaacaacctgcagcgtgtgcgtgaactggcggttcagtctgctaacagcaccaactcccagtctgacctcgactccatccaggctgaaatcacccagcgcctgaacgaaatcgaccgtgtatccggccagactcagttcaacggcgtgaaagtcctggcgcaggacaacaccctgaccatccaggttggcgccaacgacggtgaaactatcgatatcgatctgaagcagatcaactctcagaccctgggtctggactcactgaacgtgcagaaagcgtatgatgtgaaagatacagcagtaacaacgaaagcttatgccaataatggtactacactggatgtatcgggtcttgatgatgcagctattaaagcggctacgggtggtacgaatggtacggcttctgtaaccggtggtgcggttaaatttgacgcagataataacaagtactttgttactattggtggctttactggtgctgatgccgccaaaaatggcgattatgaagttaacgttgctactgacggtacagtaacccttgcggctggcgcaactaaaaccacaatgcctgctggtgcgacaactaaaacagaagtacaggagttaaaagatacaccggcagttgtttcagcagatgctaaaaatgccttaattgctggcggcgttgacgctaccgatgctaatggcgctgagttggtcaaaatgtcttataccgataaaaatggtaagacaattgaaggcggttatgcgcttaaagctggcgataagtattacgccgcagattacgatgaagcgacaggagcaattaaagctaaaaccacaagttatactgctgctgacggcactaccaaaacagcggctaaccaactgggtggcgtagacggtaaaaccgaagtcgttactatcgacggtaaaacctacaatgccagcaaagccgctggtcatgatttcaaagcacaaccagagctggcggaagcagccgctaaaaccaccgaaaacccgctgcagaaaattgatgccgcgctggcgcaggtggatgcgctgcgctctgatctgggtgcggtacaaaaccgtttcaactctgctatcaccaacctgggcaataccgtaaacaatctgtctgaagcgcgtagccgtatcgaagattccgactacgcgaccgaagtttccaacatgtctcgcgcgcagattttgcagcaggccggtacttccgttctggcgcaggctaaccaggtcccgcagaacgtgctgagcctgttagcaggtgtgaaaccgctgattctgcgcgattgctctgtggcaggctggctgctgggcaaccctatgtgtgacgaattcattaacgttccggaatggtcttacattgttgaaaaagctaaccctgtcaacgatctgtgttaccctggtgactttaacgattacgaagaactgaagcacctgctgtctcgtatcaatcacttcgagaaaatccagatcatcccgaaatcctcctggagctcccacgaagcttctctgggcgtatcctccgcgtgcccgtaccagggcaaatcctctttctttcgtaacgttgtttggctgatcaagaaaaactccacctacccgacgatcaagcgtagctataataacaccaaccaggaagacctgctggttctgtggggcatccaccatccaaacgatgctgcggaacagaccaagctgtaccagaacccgaccacctacatcagcgtgggcacctctacgctgaaccagcgtctggtaccgcgtatcgcaacccgcagcaaggtaaacggtcaaagcggccgcatggaatttttctggaccatcctgaaaccgaacgacgcaatcaacttcgaatctaacggcaatttcatcgctccggagtatgcgtacaaaatcgtaaagaaaggtgatagcactatcatgaaatccgagtagtaa

SEQ ID NO: 69 - DNA, 49 bp, Artificial Sequence
  FOR PRIMER
agtcgctgagcctgttagcaggtgtgaaaccgctgattctgcgcgattg

SEQ ID NO: 70 - DNA, 48 bp, Artificial Sequence
  REV PRIMER
tgacgctcagcttactactcggatttcatgatagtgctatcacctttc

SEQ ID NO: 71 - DNA, 2193 bp, Artificial Sequence
  STF2.HA1-2mut VN
atggcacaagtaatcaacactaacagtctgtcgctgctgacccagaataacctgaacaaatcccagtccgcactgggcaccgctatcgagcgtctgtcttctggtctgcgtatcaacagcgcgaaagacgatgcggcaggtcaggcgattgctaaccgtttcaccgcgaacatcaaaggtctgactcaggcttcccgtaacgctaacgacggtatctccattgcgcagaccactgaaggcgcgctgaacgaaatcaacaacaacctgcagcgtgtgcgtgaactggcggttcagtctgctaacagcaccaactcccagtctgacctcgactccatccaggctgaaatcacccagcgcctgaacgaaatcgaccgtgtatccggccagactcagttcaacggcgtgaaagtcctggcgcaggacaacaccctgaccatccaggttggcgccaacgacggtgaaactatcgatatcgatctgaagcagatcaactctcagaccctgggtctggactcactgaacgtgcagaaagcgtatgatgtgaaagatacagcagtaacaacgaaagcttatgccaataatggtactacactggatgtatcgggtcttgatgatgcagctattaaagcggctacgggtggtacgaatggtacggcttctgtaaccggtggtgcggttaaatttgacgcagataataacaagtactttgttactattggtggctttactggtgctgatgccgccaaaaatggcgattatgaagttaacgttgctactgacggtacagtaacccttgcggctggcgcaactaaaaccacaatgcctgctggtgcgacaactaaaacagaagtacaggagttaaaagatacaccggcagttgtttcagcagatgctaaaaatgccttaattgctggcggcgttgacgctaccgatgctaatggcgctgagttggtcaaaatgtcttataccgataaaaatggtaagacaattgaaggcggttatgcgcttaaagctggcgataagtattacgccgcagattacgatgaagcgacaggagcaattaaagctaaaaccacaagttatactgctgctgacggcactaccaaaacagcggctaaccaactgggtggcgtagacggtaaaaccgaagtcgttactatcgacggtaaaacctacaatgccagcaaagccgctggtcatgatttcaaagcacaaccagagctggcggaagcagccgctaaaaccaccgaaaacccgctgcagaaaattgatgccgcgctggcgcaggtggatgcgctgcgctctgatctgggtgcggtacaaaaccgtttcaactctgctatcaccaacctgggcaataccgtaaacaatctgtctgaagcgcgtagccgtatcgaagattccgactacgcgaccgaagtttccaacatgtctcgcgcgcagattttgcagcaggccggtacttccgttctggcgcaggctaaccaggtcccgcagaacgtgctgagcctgttagcgggtgcgaaaccgctgtctctgcgcgattgctctgtggcaggctggctgctgggcaaccctatgtgtgacgaattcattaacgttccggaatggtctgatattgccgaaaaagctaaccctgtcaacgatctgtgttaccctggtgactttaacgattacgaagaactgaagcacctgctgtctcgtatcaatcacttcgagaaaatccagatcatcccgaaatcctcctggagctcccacgaagcttctctgggcgtatcctccgcgtgcccgtaccagggcaaatcctctttctttcgtaacgttgtttggctgatcaagaaaaactccacctacccgacgatcaagcgtagctataataacaccaaccaggaagacctgctggttctgtggggcatccaccatccaaacgatgctgcggaacagaccaagctgtaccagaacccgaccacctacatcagcgtgggcacctctacgctgaaccagcgtctggtaccgcgtatcgcaacccgcagcaaggtaaacggtcaaagcggccgcatggaatttttctggaccatcctgaaaccgaacgacgcaatcaacttcgaatctaacggcaatttcatcgctccggagtatgcgtacaaaatcgtaaagaaaggtgatagcactatcatgaaatccgagtagtaa

SEQ ID NO: 72 - DNA, 675 bp, Artificial Sequence
  72 HA1-2mut VN
ggtgcgaaaccgctgtctctgcgcgattgctctgtggcaggctggctgctgggcaaccctatgtgtgacgaattcattaacgttccggaatggtctgatattgccgaaaaagctaaccctgtcaacgatctgtgttaccctggtgactttaacgattacgaagaactgaagcacctgctgtctcgtatcaatcacttcgagaaaatccagatcatcccgaaatcctcctggagctcccacgaagcttctctgggcgtatcctccgcgtgcccgtaccagggcaaatcctctttctttcgtaacgttgtttggctgatcaagaaaaactccacctacccgacgatcaagcgtagctataataacaccaaccaggaagacctgctggttctgtggggcatccaccatccaaacgatgctgcggaacagaccaagctgtaccagaacccgaccacctacatcagcgtgggcacctctacgctgaaccagcgtctggtaccgcgtatcgcaacccgcagcaaggtaaacggtcaaagcggccgcatggaatttttctggaccatcctgaaaccgaacgacgcaatcaacttcgaatctaacggcaatttcatcgctccggagtatgcgtacaaaatcgtaaagaaaggtgatagcactatcatgaaatccgagtagtaa

SEQ ID NO: 73 - DNA, 2346 bp, Artificial Sequence
  STF2.HA1-1 IND
atggcacaagtaatcaacactaacagtctgtcgctgctgacccagaataacctgaacaaatcccagtccgcactgggcaccgctatcgagcgtctgtcttctggtctgcgtatcaacagcgcgaaagacgatgcggcaggtcaggcgattgctaaccgtttcaccgcgaacatcaaaggtctgactcaggcttcccgtaacgctaacgacggtatctccattgcgcagaccactgaaggcgcgctgaacgaaatcaacaacaacctgcagcgtgtgcgtgaactggcggttcagtctgctaacagcaccaactcccagtctgacctcgactccatccaggctgaaatcacccagcgcctgaacgaaatcgaccgtgtatccggccagactcagttcaacggcgtgaaagtcctggcgcaggacaacaccctgaccatccaggttggcgccaacgacggtgaaactatcgatatcgatctgaagcagatcaactctcagaccctgggtctggactcactgaacgtgcagaaagcgtatgatgtgaaagatacagcagtaacaacgaaagcttatgccaataatggtactacactggatgtatcgggtcttgatgatgcagctattaaagcggctacgggtggtacgaatggtacggcttctgtaaccggtggtgcggttaaatttgacgcagataataacaagtactttgttactattggtggctttactggtgctgatgccgccaaaaatggcgattatgaagttaacgttgctactgacggtacagtaacccttgcggctggcgcaactaaaaccacaatgcctgctggtgcgacaactaaaacagaagtacaggagttaaaagatacaccggcagttgtttcagcagatgctaaaaatgccttaattgctggcggcgttgacgctaccgatgctaatggcgctgagttggtcaaaatgtcttataccgataaaaatggtaagacaattgaaggcggttatgcgcttaaagctggcgataagtattacgccgcagattacgatgaagcgacaggagcaattaaagctaaaaccacaagttatactgctgctgacggcactaccaaaacagcggctaaccaactgggtggcgtagacggtaaaaccgaagtcgttactatcgacggtaaaacctacaatgccagcaaagccgctggtcatgatttcaaagcacaaccagagctggcggaagcagccgctaaaaccaccgaaaacccgctgcagaaaattgatgccgcgctggcgcaggtggatgcgctgcgctctgatctgggtgcggtacaaaaccgtttcaactctgctatcaccaacctgggcaataccgtaaacaatctgtctgaagcgcgtagccgtatcgaagattccgactacgcgaccgaagtttccaacatgtctcgcgcgcagattttgcagcaggccggtacttccgttctggcgcaggctaaccaggtcccgcagaacgtgctgtctctgttagcggagaaaacgcataacggtaaactgtgcgacctggacggcgtgaagccgctgatcctgcgtgactgttctgttgctggctggctgctgggcaacccgatgtgcgatgagttcatcaacgttccggagtggtcttatattgttgaaaaagcgaacccgaccaatgacctgtgctacccgggctcttttaatgactacgaggagctgaaacatctgctgtctcgcatcaaccatttcgaaaaaattcagatcatcccgaaatcttcctggagcgatcacgaagcttcttccggcgtatcttctgcatgcccttacctgggttccccgtctttcttccgtaacgtggtttggctgatcaagaagaactctacgtacccgaccatcaagaaatcctataacaacactaaccaggaagatctgctggtgctgtggggtatccatcatccaaacgatgcagccgaacagacccgcctgtaccagaatccgaccacgtacatctctatcggcacttctaccctgaatcaacgcctggtgccgaaaatcgcaactcgcagcaaagtcaacggccaatctggtcgcatggagtttttctggaccatcctgaaaccgaacgacgcgattaacttcgaaagcaacggcaacttcattgcaccggaatatgcttacaagatcgttaaaaagggtgattctgcgatcatgaaaagcgagctggaatacggcaactgcaacactaaatgccagaccccgatgggtgcaatcaattccagcatgccatttcacaacatccacccgctgaccatcggcgagtgtccaaaatacgttaaataatag

SEQ ID NO: 74 - DNA, 46 bp, Artificial Sequence
  FOR PRIMER
agtggctgagcctgttagcggagaaaacgcataacggtaaactgtg

SEQ ID NO: 75 - DNA, 1685 bp, Artificial Sequence
  HA0s IND
gctgagcctgttacgtgatcaaatctgcatcggttaccacgcaaacaactccactgaacaagtggatacgatcatggaaaagaacgtgaccgtgacccacgctcaagatatcctggagaaaacgcataacggtaaactgtgcgacctggacggcgtgaagccgctgatcctgcgtgactgttctgttgctggctggctgctgggcaacccgatgtgcgatgagttcatcaacgttccggagtggtcttatattgttgaaaaagcgaacccgaccaatgacctgtgctacccgggctcttttaatgactacgaggagctgaaacatctgctgtctcgcatcaaccatttcgaaaaaattcagatcatcccgaaatcttcctggagcgatcacgaagcttcttccggcgtatcttctgcatgcccttacctgggttccccgtctttcttccgtaacgtggtttggctgatcaagaagaactctacgtacccgaccatcaagaaatcctataacaacactaaccaggaagatctgctggtgctgtggggtatccatcatccaaacgatgcagccgaacagacccgcctgtaccagaatccgaccacgtacatctctatcggcacttctaccctgaatcaacgcctggtgccgaaaatcgcaactcgcagcaaagtcaacggccaatctggtcgcatggagtttttctggaccatcctgaaaccgaacgacgcgattaacttcgaaagcaacggcaacttcattgcaccggaatatgcttacaagatcgttaaaaagggtgattctgcgatcatgaaaagcgagctggaatacggcaactgcaacactaaatgccagaccccgatgggtgcaatcaattccagcatgccatttcacaacatccacccgctgaccatcggcgagtgtccaaaatacgttaaatccaatcgtctggtgctggcaacgggcctgcgcaactctccgcaacgtgagtctcgtcgcaaaaagcgtggcctgtttggcgcaattgcgggcttcatcgagggcggctggcagggtatggttgatggttggtacggttatcaccattccaacgagcagggctctggttacgctgcggacaaagagtccacgcagaaagcgatcgatggcgtcaccaacaaagtgaactctatcatcgacaagatgaacactcagttcgaggctgtgggccgtgaattcaacaatctggaacgtcgcatcgaaaacctgaacaaaaagatggaagacggtttcctggacgtatggacctataacgcagagctgctggttctgatggaaaacgaacgtactctggacttccacgattctaacgttaaaaacctgtacgacaaagttcgtctgcagctgcgcgataatgcaaaagaactgggtaacggctgctttgaattttaccacaaatgtgacaacgaatgcatggaaagcatccgtaacggtacctacaattacccacagtactccgaagaagcgcgtctgaaacgtgaagaaatctccggtgtaaaactggaatccattggcacgtatcagattctgtctatctactccacggtagcgtcctctctggcgctggcaattatgatggccggcctgtctctgtggatgtgctctaacggctctctgcagtgccgcatctgcatctaataggctgagc

SEQ ID NO: 76 - DNA, 2193 bp, Artificial Sequence
  STF2.HA1-2 IND
atggcacaagtaatcaacactaacagtctgtcgctgctgacccagaataacctgaacaaatcccagtccgcactgggcaccgctatcgagcgtctgtcttctggtctgcgtatcaacagcgcgaaagacgatgcggcaggtcaggcgattgctaaccgtttcaccgcgaacatcaaaggtctgactcaggcttcccgtaacgctaacgacggtatctccattgcgcagaccactgaaggcgcgctgaacgaaatcaacaacaacctgcagcgtgtgcgtgaactggcggttcagtctgctaacagcaccaactcccagtctgacctcgactccatccaggctgaaatcacccagcgcctgaacgaaatcgaccgtgtatccggccagactcagttcaacggcgtgaaagtcctggcgcaggacaacaccctgaccatccaggttggcgccaacgacggtgaaactatcgatatcgatctgaagcagatcaactctcagaccctgggtctggactcactgaacgtgcagaaagcgtatgatgtgaaagatacagcagtaacaacgaaagcttatgccaataatggtactacactggatgtatcgggtcttgatgatgcagctattaaagcggctacgggtggtacgaatggtacggcttctgtaaccggtggtgcggttaaatttgacgcagataataacaagtactttgttactattggtggctttactggtgctgatgccgccaaaaatggcgattatgaagttaacgttgctactgacggtacagtaacccttgcggctggcgcaactaaaaccacaatgcctgctggtgcgacaactaaaacagaagtacaggagttaaaagatacaccggcagttgtttcagcagatgctaaaaatgccttaattgctggcggcgttgacgctaccgatgctaatggcgctgagttggtcaaaatgtcttataccgataaaaatggtaagacaattgaaggcggttatgcgcttaaagctggcgataagtattacgccgcagattacgatgaagcgacaggagcaattaaagctaaaaccacaagttatactgctgctgacggcactaccaaaacagcggctaaccaactgggtggcgtagacggtaaaaccgaagtcgttactatcgacggtaaaacctacaatgccagcaaagccgctggtcatgatttcaaagcacaaccagagctggcggaagcagccgctaaaaccaccgaaaacccgctgcagaaaattgatgccgcgctggcgcaggtggatgcgctgcgctctgatctgggtgcggtacaaaaccgtttcaactctgctatcaccaacctgggcaataccgtaaacaatctgtctgaagcgcgtagccgtatcgaagattccgactacgcgaccgaagtttccaacatgtctcgcgcgcagattttgcagcaggccggtacttccgttctggcgcaggctaaccaggtcccgcagaacgtgctgagcctgttagcaggtgtgaaaccgctgattctgcgcgattgttctgttgctggctggctgctgggcaacccgatgtgcgatgagttcatcaacgttccggagtggtcttatattgttgaaaaagcgaacccgaccaatgacctgtgctacccgggctcttttaatgactacgaggagctgaaacatctgctgtctcgcatcaaccatttcgaaaaaattcagatcatcccgaaatcttcctggagcgatcacgaagcttcttccggcgtatcttctgcatgcccttacctgggttccccgtctttcttccgtaacgtggtttggctgatcaagaagaactctacgtacccgaccatcaagaaatcctataacaacactaaccaggaagatctgctggtgctgtggggtatccatcatccaaacgatgcagccgaacagacccgcctgtaccagaatccgaccacgtacatctctatcggcacttctaccctgaatcaacgcctggtgccgaaaatcgcaactcgcagcaaagtcaacggccaatctggtcgcatggagtttttctggaccatcctgaaaccgaacgacgcgattaacttcgaaagcaacggcaacttcattgcaccggaatatgcttacaagatcgttaaaaagggtgattctgcgatcatgaaaagcgagtaatag

SEQ ID NO: 77 - DNA, 43 bp, Artificial Sequence
  REV PRIMER
agtcgctcagcctattactcgcttttcatgatcgcagaatcac

SEQ ID NO: 78 - DNA, 2193 bp, Artificial Sequence
  STF2.HA1-2mut IND
atggcacaagtaatcaacactaacagtctgtcgctgctgacccagaataacctgaacaaatcccagtccgcactgggcaccgctatcgagcgtctgtcttctggtctgcgtatcaacagcgcgaaagacgatgcggcaggtcaggcgattgctaaccgtttcaccgcgaacatcaaaggtctgactcaggcttcccgtaacgctaacgacggtatctccattgcgcagaccactgaaggcgcgctgaacgaaatcaacaacaacctgcagcgtgtgcgtgaactggcggttcagtctgctaacagcaccaactcccagtctgacctcgactccatccaggctgaaatcacccagcgcctgaacgaaatcgaccgtgtatccggccagactcagttcaacggcgtgaaagtcctggcgcaggacaacaccctgaccatccaggttggcgccaacgacggtgaaactatcgatatcgatctgaagcagatcaactctcagaccctgggtctggactcactgaacgtgcagaaagcgtatgatgtgaaagatacagcagtaacaacgaaagcttatgccaataatggtactacactggatgtatcgggtcttgatgatgcagctattaaagcggctacgggtggtacgaatggtacggcttctgtaaccggtggtgcggttaaatttgacgcagataataacaagtactttgttactattggtggctttactggtgctgatgccgccaaaaatggcgattatgaagttaacgttgctactgacggtacagtaacccttgcggctggcgcaactaaaaccacaatgcctgctggtgcgacaactaaaacagaagtacaggagttaaaagatacaccggcagttgtttcagcagatgctaaaaatgccttaattgctggcggcgttgacgctaccgatgctaatggcgctgagttggtcaaaatgtcttataccgataaaaatggtaagacaattgaaggcggttatgcgcttaaagctggcgataagtattacgccgcagattacgatgaagcgacaggagcaattaaagctaaaaccacaagttatactgctgctgacggcactaccaaaacagcggctaaccaactgggtggcgtagacggtaaaaccgaagtcgttactatcgacggtaaaacctacaatgccagcaaagccgctggtcatgatttcaaagcacaaccagagctggcggaagcagccgctaaaaccaccgaaaacccgctgcagaaaattgatgccgcgctggcgcaggtggatgcgctgcgctctgatctgggtgcggtacaaaaccgtttcaactctgctatcaccaacctgggcaataccgtaaacaatctgtctgaagcgcgtagccgtatcgaagattccgactacgcgaccgaagtttccaacatgtctcgcgcgcagattttgcagcaggccggtacttccgttctggcgcaggctaaccaggtcccgcagaacgtgctgtctctgttagcgggcgcaaagccgctgtctctgcgtgactgttctgttgctggctggctgctgggcaacccgatgtgcgatgagttcatcaacgttccggagtggtctgatattgcggaaaaagcgaacccgaccaatgacctgtgctacccgggctcttttaatgactacgaggagctgaaacatctgctgtctcgcatcaaccatttcgaaaaaattcagatcatcccgaaatcttcctggagcgatcacgaagcttcttccggcgtatcttctgcatgcccttacctgggttccccgtctttcttccgtaacgtggtttggctgatcaagaagaactctacgtacccgaccatcaagaaatcctataacaacactaaccaggaagatctgctggtgctgtggggtatccatcatccaaacgatgcagccgaacagacccgcctgtaccagaatccgaccacgtacatctctatcggcacttctaccctgaatcaacgcctggtgccgaaaatcgcaactcgcagcaaagtcaacggccaatctggtcgcatggagtttttctggaccatcctgaaaccgaacgacgcgattaacttcgaaagcaacggcaacttcattgcaccggaatatgcttacaagatcgttaaaaagggtgattctgcgatcatgaaaagcgagtaatag

SEQ ID NO: 79 - DNA, 682 bp, Artificial Sequence
  HA1-2mut IND
ggcgcaaagccgctgtctctgcgtgactgttctgttgctggctggctgctgggcaacccgatgtgcgatgagttcatcaacgttccggagtggtctgatattgcggaaaaagcgaacccgaccaatgacctgtgctacccgggctcttttaatgactacgaggagctgaaacatctgctgtctcgcatcaaccatttcgaaaaaattcagatcatcccgaaatcttcctggagcgatcacgaagcttcttccggcgtatcttctgcatgcccttacctgggttccccgtctttcttccgtaacgtggtttggctgatcaagaagaactctacgtacccgaccatcaagaaatcctataacaacactaaccaggaagatctgctggtgctgtggggtatccatcatccaaacgatgcagccgaacagacccgcctgtaccagaatccgaccacgtacatctctatcggcacttctaccctgaatcaacgcctggtgccgaaaatcgcaactcgcagcaaagtcaacggccaatctggtcgcatggagtttttctggaccatcctgaaaccgaacgacgcgattaacttcgaaagcaacggcaacttcattgcaccggaatatgcttacaagatcgttaaaaagggtgattctgcgatcatgaaaagcgagtaataggctgagc

SEQ ID NO: 80 - DNA, 2340 bp, Artificial Sequence
  STF2.HA1-1 NC
atggcacaagtaatcaacactaacagtctgtcgctgctgacccagaataacctgaacaaatcccagtccgcactgggcaccgctatcgagcgtctgtcttctggtctgcgtatcaacagcgcgaaagacgatgcggcaggtcaggcgattgctaaccgtttcaccgcgaacatcaaaggtctgactcaggcttcccgtaacgctaacgacggtatctccattgcgcagaccactgaaggcgcgctgaacgaaatcaacaacaacctgcagcgtgtgcgtgaactggcggttcagtctgctaacagcaccaactcccagtctgacctcgactccatccaggctgaaatcacccagcgcctgaacgaaatcgaccgtgtatccggccagactcagttcaacggcgtgaaagtcctggcgcaggacaacaccctgaccatccaggttggcgccaacgacggtgaaactatcgatatcgatctgaagcagatcaactctcagaccctgggtctggactcactgaacgtgcagaaagcgtatgatgtgaaagatacagcagtaacaacgaaagcttatgccaataatggtactacactggatgtatcgggtcttgatgatgcagctattaaagcggctacgggtggtacgaatggtacggcttctgtaaccggtggtgcggttaaatttgacgcagataataacaagtactttgttactattggtggctttactggtgctgatgccgccaaaaatggcgattatgaagttaacgttgctactgacggtacagtaacccttgcggctggcgcaactaaaaccacaatgcctgctggtgcgacaactaaaacagaagtacaggagttaaaagatacaccggcagttgtttcagcagatgctaaaaatgccttaattgctggcggcgttgacgctaccgatgctaatggcgctgagttggtcaaaatgtcttataccgataaaaatggtaagacaattgaaggcggttatgcgcttaaagctggcgataagtattacgccgcagattacgatgaagcgacaggagcaattaaagctaaaaccacaagttatactgctgctgacggcactaccaaaacagcggctaaccaactgggtggcgtagacggtaaaaccgaagtcgttactatcgacggtaaaacctacaatgccagcaaagccgctggtcatgatttcaaagcacaaccagagctggcggaagcagccgctaaaaccaccgaaaacccgctgcagaaaattgatgccgcgctggcgcaggtggatgcgctgcgctctgatctgggtgcggtacaaaaccgtttcaactctgctatcaccaacctgggcaataccgtaaacaatctgtctgaagcgcgtagccgtatcgaagattccgactacgcgaccgaagtttccaacatgtctcgcgcgcagattttgcagcaggccggtacttccgttctggcgcaggctaaccaggtcccgcagaacgtgctgagcctgttagcgtcccacaacggtaaactgtgtctgctgaaaggcatcgcaccgctgcagctgggtaactgtagcgttgcaggttggatcctgggtaacccggagtgcgaactgctgatttccaaggagagctggtcttacattgtcgaaacgccgaatccggaaaacggcacttgttatccgggttacttcgccgattacgaagaactgcgtgaacaactgtcttccgtgagctctttcgaacgtttcgagatcttcccgaaagagagcagctggccaaaccacactgttaccggtgtgtctgcgagctgttctcacaacggcaagtcttctttctaccgcaacctgctgtggctgacgggtaagaatggcctgtatccgaacctgtctaaatcttacgtaaacaacaaagagaaagaggtgctggtcctgtggggcgtacaccatccaccaaatatcggcaaccagcgcgccctgtaccacaccgaaaacgcttatgtgtccgtggtgagctcccattacagccgtcgttttactccggagattgccaaacgtccgaaagttcgtgatcaggaaggccgtattaactactactggactctgctggagccgggcgataccatcattttcgaggcaaacggcaacctgattgcgccatggtacgcgttcgccctgagccgtggttttggctccggtattatcacctctaacgcgccaatggacgaatgcgacgcgaaatgccaaacgccgcagggcgcaatcaacagcagcctgccgttccagaacgttcacccggttaccatcggcgaatgccctaaatacgtgcgctaatag

SEQ ID NO: 81 - DNA, 84 bp, Artificial Sequence
  FOR PRIMER
aaccaggtcccgcagaacgtgctgagcctgttagcgtcccacaacggtaaactgtgtctgctgaaaggcatcgcaccgctgcag

SEQ ID NO: 82 - DNA, 78 bp, Artificial Sequence
  REV PRIMER
gaacagctcagttcctacgagctcagcctattagcgcacgtatttagggcattcgccgatggtaaccgggtgaacgtt

SEQ ID NO: 83 - DNA, 1653 bp, Artificial Sequence
  HA0s NC
gacacgatctgtattggttatcatgcaaacaactctactgacactgtagatactgtgctggaaaagaacgtaaccgttacccacagcgttaacctgctggaagattcccacaacggtaaactgtgtctgctgaaaggcatcgcaccgctgcagctgggtaactgtagcgttgcaggttggatcctgggtaacccggagtgcgaactgctgatttccaaggagagctggtcttacattgtcgaaacgccgaatccggaaaacggcacttgttatccgggttacttcgccgattacgaagaactgcgtgaacaactgtcttccgtgagctctttcgaacgtttcgagatcttcccgaaagagagcagctggccaaaccacactgttaccggtgtgtctgcgagctgttctcacaacggcaagtcttctttctaccgcaacctgctgtggctgacgggtaagaatggcctgtatccgaacctgtctaaatcttacgtaaacaacaaagagaaagaggtgctggtcctgtggggcgtacaccatccaccaaatatcggcaaccagcgcgccctgtaccacaccgaaaacgcttatgtgtccgtggtgagctcccattacagccgtcgttttactccggagattgccaaacgtccgaaagttcgtgatcaggaaggccgtattaactactactggactctgctggagccgggcgataccatcattttcgaggcaaacggcaacctgattgcgccatggtacgcgttcgccctgagccgtggttttggctccggtattatcacctctaacgcgccaatggacgaatgcgacgcgaaatgccaaacgccgcagggcgcaatcaacagcagcctgccgttccagaacgttcacccggttaccatcggcgaatgccctaaatacgtgcgctccgccaaactgcgcatggttactggtctgcgtaacatcccgagcattcagtctcgcggtctgttcggtgcgatcgcgggcttcattgaaggcggttggaccggtatggtggatggttggtacggctaccatcaccagaacgaacagggtagcggttacgctgccgaccagaaatccacccagaacgctattaacggtatcaccaacaaagttaacagcgtaattgagaagatgaacacgcagttcaccgccgtaggtaaggaattcaacaagctggaacgtcgcatggaaaacctgaacaaaaaggtggacgacggctttctggacatctggacctacaacgctgaactgctggtgctgctggaaaacgaacgtaccctggatttccacgactctaatgttaaaaacctgtacgaaaaggtcaagtctcaactgaaaaacaatgcgaaggaaatcggcaacggctgtttcgaattctaccataaatgcaacaacgaatgcatggaatccgttaaaaacggtacctatgactaccctaaatactccgaagaaagcaaactgaaccgcgagaaaatcgatggtgtaaaactggaatctatgggtgtttaccagatcctggcgatctactccacggtagccagcagcctggttctgctggttagcctgggtgcaattagcttctggatgtgctctaacggcagcctgcaatgccgcatctgtaataggctgagc

SEQ ID NO: 84 - DNA, 2193 bp, Artificial Sequence
  STF2HA1-2 NC
atggcacaagtaatcaacactaacagtctgtcgctgctgacccagaataacctgaacaaatcccagtccgcactgggcaccgctatcgagcgtctgtcttctggtctgcgtatcaacagcgcgaaagacgatgcggcaggtcaggcgattgctaaccgtttcaccgcgaacatcaaaggtctgactcaggcttcccgtaacgctaacgacggtatctccattgcgcagaccactgaaggcgcgctgaacgaaatcaacaacaacctgcagcgtgtgcgtgaactggcggttcagtctgctaacagcaccaactcccagtctgacctcgactccatccaggctgaaatcacccagcgcctgaacgaaatcgaccgtgtatccggccagactcagttcaacggcgtgaaagtcctggcgcaggacaacaccctgaccatccaggttggcgccaacgacggtgaaactatcgatatcgatctgaagcagatcaactctcagaccctgggtctggactcactgaacgtgcagaaagcgtatgatgtgaaagatacagcagtaacaacgaaagcttatgccaataatggtactacactggatgtatcgggtcttgatgatgcagctattaaagcggctacgggtggtacgaatggtacggcttctgtaaccggtggtgcggttaaatttgacgcagataataacaagtactttgttactattggtggctttactggtgctgatgccgccaaaaatggcgattatgaagttaacgttgctactgacggtacagtaacccttgcggctggcgcaactaaaaccacaatgcctgctggtgcgacaactaaaacagaagtacaggagttaaaagatacaccggcagttgtttcagcagatgctaaaaatgccttaattgctggcggcgttgacgctaccgatgctaatggcgctgagttggtcaaaatgtcttataccgataaaaatggtaagacaattgaaggcggttatgcgcttaaagctggcgataagtattacgccgcagattacgatgaagcgacaggagcaattaaagctaaaaccacaagttatactgctgctgacggcactaccaaaacagcggctaaccaactgggtggcgtagacggtaaaaccgaagtcgttactatcgacggtaaaacctacaatgccagcaaagccgctggtcatgatttcaaagcacaaccagagctggcggaagcagccgctaaaaccaccgaaaacccgctgcagaaaattgatgccgcgctggcgcaggtggatgcgctgcgctctgatctgggtgcggtacaaaaccgtttcaactctgctatcaccaacctgggcaataccgtaaacaatctgtctgaagcgcgtagccgtatcgaagattccgactacgcgaccgaagtttccaacatgtctcgcgcgcagattttgcagcaggccggtacttccgttctggcgcaggctaaccaggtcccgcagaacgtgctgagcctgttagcgaaaggcatcgcaccgctgcagctgggtaactgtagcgttgcaggttggatcctgggtaacccggagtgcgaactgctgatttccaaggagagctggtcttacattgtcgaaacgccgaatccggaaaacggcacttgttatccgggttacttcgccgattacgaagaactgcgtgaacaactgtcttccgtgagctctttcgaacgtttcgagatcttcccgaaagagagcagctggccaaaccacactgttaccggtgtgtctgcgagctgttctcacaacggcaagtcttctttctaccgcaacctgctgtggctgacgggtaagaatggcctgtatccgaacctgtctaaatcttacgtaaacaacaaagagaaagaggtgctggtcctgtggggcgtacaccatccaccaaatatcggcaaccagcgcgccctgtaccacaccgaaaacgcttatgtgtccgtggtgagctcccattacagccgtcgttttactccggagattgccaaacgtccgaaagttcgtgatcaggaaggccgtattaactactactggactctgctggagccgggcgataccatcattttcgaggcaaacggcaacctgattgcgccatggtacgcgttcgccctgagccgtggttttggctccggtattatcacctcttaataa

SEQ ID NO: 85 - DNA, 84 bp, Artificial Sequence
  FOR PRIMER
aaccaggtcccgcagaacgtgctgagcctgttagcgaaaggcatcgcaccgctgcagctgggtaactgtagcgttgcaggttgg

SEQ ID NO: 86 - DNA, 84 bp, Artificial Sequence
  REV PRIMER
gaacagctcagttcctacgagctcagcctattaagaggtgataataccggagccaaaaccacggctcagggcgaacgcgtacca

SEQ ID NO: 87 - DNA, 2193 bp, Artificial Sequence
  STF2.HA1-2mut NC
atggcacaagtaatcaacactaacagtctgtcgctgctgacccagaataacctgaacaaatcccagtccgcactgggcaccgctatcgagcgtctgtcttctggtctgcgtatcaacagcgcgaaagacgatgcggcaggtcaggcgattgctaaccgtttcaccgcgaacatcaaaggtctgactcaggcttcccgtaacgctaacgacggtatctccattgcgcagaccactgaaggcgcgctgaacgaaatcaacaacaacctgcagcgtgtgcgtgaactggcggttcagtctgctaacagcaccaactcccagtctgacctcgactccatccaggctgaaatcacccagcgcctgaacgaaatcgaccgtgtatccggccagactcagttcaacggcgtgaaagtcctggcgcaggacaacaccctgaccatccaggttggcgccaacgacggtgaaactatcgatatcgatctgaagcagatcaactctcagaccctgggtctggactcactgaacgtgcagaaagcgtatgatgtgaaagatacagcagtaacaacgaaagcttatgccaataatggtactacactggatgtatcgggtcttgatgatgcagctattaaagcggctacgggtggtacgaatggtacggcttctgtaaccggtggtgcggttaaatttgacgcagataataacaagtactttgttactattggtggctttactggtgctgatgccgccaaaaatggcgattatgaagttaacgttgctactgacggtacagtaacccttgcggctggcgcaactaaaaccacaatgcctgctggtgcgacaactaaaacagaagtacaggagttaaaagatacaccggcagttgtttcagcagatgctaaaaatgccttaattgctggcggcgttgacgctaccgatgctaatggcgctgagttggtcaaaatgtcttataccgataaaaatggtaagacaattgaaggcggttatgcgcttaaagctggcgataagtattacgccgcagattacgatgaagcgacaggagcaattaaagctaaaaccacaagttatactgctgctgacggcactaccaaaacagcggctaaccaactgggtggcgtagacggtaaaaccgaagtcgttactatcgacggtaaaacctacaatgccagcaaagccgctggtcatgatttcaaagcacaaccagagctggcggaagcagccgctaaaaccaccgaaaacccgctgcagaaaattgatgccgcgctggcgcaggtggatgcgctgcgctctgatctgggtgcggtacaaaaccgtttcaactctgctatcaccaacctgggcaataccgtaaacaatctgtctgaagcgcgtagccgtatcgaagattccgactacgcgaccgaagtttccaacatgtctcgcgcgcagattttgcagcaggccggtacttccgttctggcgcaggctaaccaggtcccgcagaacgtgctgagcctgttagcgaaaggcgcggcaccgctgcagctgggtaactgtagcgttgcaggttggatcctgggtaacccggagtgcgaactgctgatttccaaggagagctggtctgatattgcagaaacgccgaatccggaaaacggcacttgttatccgggttacttcgccgattacgaagaactgcgtgaacaactgtcttccgtgagctctttcgaacgtttcgagatcttcccgaaagagagcagctggccaaaccacactgttaccggtgtgtctgcgagctgttctcacaacggcaagtcttctttctaccgcaacctgctgtggctgacgggtaagaatggcctgtatccgaacctgtctaaatcttacgtaaacaacaaagagaaagaggtgctggtcctgtggggcgtacaccatccaccaaatatcggcaaccagcgcgccctgtaccacaccgaaaacgcttatgtgtccgtggtgagctcccattacagccgtcgttttactccggagattgccaaacgtccgaaagttcgtgatcaggaaggccgtattaactactactggactctgctggagccgggcgataccatcattttcgaggcaaacggcaacctgattgcgccatggtacgcgttcgccctgagccgtggttttggctccggtattatcacctcttaatag

SEQ ID NO: 88 - DNA, 698 bp, Artificial Sequence
  HA1-2mut NC
gctgagcctgttagcgaaaggcgcggcaccgctgcagctgggtaactgtagcgttgcaggttggatcctgggtaacccggagtgcgaactgctgatttccaaggagagctggtctgatattgcagaaacgccgaatccggaaaacggcacttgttatccgggttacttcgccgattacgaagaactgcgtgaacaactgtcttccgtgagctctttcgaacgtttcgagatcttcccgaaagagagcagctggccaaaccacactgttaccggtgtgtctgcgagctgttctcacaacggcaagtcttctttctaccgcaacctgctgtggctgacgggtaagaatggcctgtatccgaacctgtctaaatcttacgtaaacaacaaagagaaagaggtgctggtcctgtggggcgtacaccatccaccaaatatcggcaaccagcgcgccctgtaccacaccgaaaacgcttatgtgtccgtggtgagctcccattacagccgtcgttttactccggagattgccaaacgtccgaaagttcgtgatcaggaaggccgtattaactactactggactctgctggagccgggcgataccatcattttcgaggcaaacggcaacctgattgcgccatggtacgcgttcgccctgagccgtggttttggctccggtattatcacctcttaataggctgagc

SEQ ID NO: 89 - protein, 784 aa, Artificial Sequence
  STF2.HA1-1his (PR8)
MAQVINTNSLSLLTQNNLNKSQSALGTAIERLSSGLRINSAKDDAAGQAIANRFTANIKGLTQASRNANDGISIAQTTEGALNEINNNLQRVRELAVQSANSTNSQSDLDSIQAEITQRLNEIDRVSGQTQFNGVKVLAQDNTLTIQVGANDGETIDIDLKQINSQTLGLDSLNVQKAYDVKDTAVTTKAYANNGTTLDVSGLDDAAIKAATGGTNGTASVTGGAVKFDADNNKYFVTIGGFTGADAAKNGDYEVNVATDGTVTLAAGATKTTMPAGATTKTEVQELKDTPAVVSADAKNALIAGGVDATDANGAELVKMSYTDKNGKTIEGGYALKAGDKYYAADYDEATGAIKAKTTSYTAADGTTKTAANQLGGVDGKTEVVTIDGKTYNASKAAGHDFKAQPELAEAAAKTTENPLQKIDAALAQVDALRSDLGAVQNRFNSAITNLGNTVNNLSEARSRIEDSDYATEVSNMSRAQILQQAGTSVLAQANQVPQNVLSLLASHNGKLCRLKGIAPLQLGKCNIAGWLLGNPECDPLLPVRSWSYIVETPNSENGICYPGDFIDYEELREQLSSVSSFERFEIFPKESSWPNHNTNGVTAACSHEGKSSFYRNLLWLTEKEGSYPKLKNSYVNKKGKEVLVLWGIHHPPNSKEQQNLYQNENAYVSVVTSNYNRRFTPEIAERPKVRDQAGRMNYYWTLLKPGDTIIFEANGNLIAPMYAFALSRGFGSGIITSNASMHECNTKCQTPLGAINSSLPYQNIHPVTIGECPKYVRHHHHHH

SEQ ID NO: 90 - protein, 729 aa, Artificial Sequence
  STF2.HA1-2 (PR8)
MAQVINTNSLSLLTQNNLNKSQSALGTAIERLSSGLRINSAKDDAAGQAIANRFTANIKGLTQASRNANDGISIAQTTEGALNEINNNLQRVRELAVQSANSTNSQSDLDSIQAEITQRLNEIDRVSGQTQFNGVKVLAQDNTLTIQVGANDGETIDIDLKQINSQTLGLDSLNVQKAYDVKDTAVTTKAYANNGTTLDVSGLDDAAIKAATGGTNGTASVTGGAVKFDADNNKYFVTIGGFTGADAAKNGDYEVNVATDGTVTLAAGATKTTMPAGATTKTEVQELKDTPAVVSADAKNALIAGGVDATDANGAELVKMSYTDKNGKTIEGGYALKAGDKYYAADYDEATGAIKAKTTSYTAADGTTKTAANQLGGVDGKTEVVTIDGKTYNASKAAGHDFKAQPELAEAAAKTTENPLQKIDAALAQVDALRSDLGAVQNRFNSAITNLGNTVNNLSEARSRIEDSDYATEVSNMSRAQILQQAGTSVLAQANQVPQNVLSLLAKGIAPLQLGKCNIAGWLLGNPECDPLLPVRSWSYIVETPNSENGICYPGDFIDYEELREQLSSVSSFERFEIFPKESSWPNHNTNGVTAACSHEGKSSFYRNLLWLTEKEGSYPKLKNSYVNKKGKEVLVLWGIHHPPNSKEQQNLYQNENAYVSVVTSNYNRRFTPEIAERPKVRDQAGRMNYYWTLLKPGDTIIFEANGNLIAPMYAFALSRGFGSGIITS

SEQ ID NO: 91 - protein, 729 aa, Artificial Sequence
  STF2.HA1-2mut (PR8)
MAQVINTNSLSLLTQNNLNKSQSALGTAIERLSSGLRINSAKDDAAGQAIANRFTANIKGLTQASRNANDGISIAQTTEGALNEINNNLQRVRELAVQSANSTNSQSDLDSIQAEITQRLNEIDRVSGQTQFNGVKVLAQDNTLTIQVGANDGETIDIDLKQINSQTLGLDSLNVQKAYDVKDTAVTTKAYANNGTTLDVSGLDDAAIKAATGGTNGTASVTGGAVKFDADNNKYFVTIGGFTGADAAKNGDYEVNVATDGTVTLAAGATKTTMPAGATTKTEVQELKDTPAVVSADAKNALIAGGVDATDANGAELVKMSYTDKNGKTIEGGYALKAGDKYYAADYDEATGAIKAKTTSYTAADGTTKTAANQLGGVDGKTEVVTIDGKTYNASKAAGHDFKAQPELAEAAAKTTENPLQKIDAALAQVDALRSDLGAVQNRFNSAITNLGNTVNNLSEARSRIEDSDYATEVSNMSRAQILQQAGTSVLAQANQVPQNVLSLLAKGAAPLQLGKCNIAGWLLGNPECDPLLPVRSWSDIAETPNSENGICYPGDFIDYEELREQLSSVSSFERFEIFPKESSWPNHNTNGVTAACSHEGKSSFYRNLLWLTEKEGSYPKLKNSYVNKKGKEVLVLWGIHHPPNSKEQQNLYQNENAYVSVVTSNYNRRFTPEIAERPKVRDQAGRMNYYWTLLKPGDTIIFEANGNLIAPMYAFALSRGFGSGIITS

SEQ ID NO: 92 - protein, 682 aa, Artificial Sequence
  STF2.HA1-3 (PR8)
MAQVINTNSLSLLTQNNLNKSQSALGTAIERLSSGLRINSAKDDAAGQAIANRFTANIKGLTQASRNANDGISIAQTTEGALNEINNNLQRVRELAVQSANSTNSQSDLDSIQAEITQRLNEIDRVSGQTQFNGVKVLAQDNTLTIQVGANDGETIDIDLKQINSQTLGLDSLNVQKAYDVKDTAVTTKAYANNGTTLDVSGLDDAAIKAATGGTNGTASVTGGAVKFDADNNKYFVTIGGFTGADAAKNGDYEVNVATDGTVTLAAGATKTTMPAGATTKTEVQELKDTPAVVSADAKNALIAGGVDATDANGAELVKMSYTDKNGKTIEGGYALKAGDKYYAADYDEATGAIKAKTTSYTAADGTTKTAANQLGGVDGKTEVVTIDGKTYNASKAAGHDFKAQPELAEAAAKTTENPLQKIDAALAQVDALRSDLGAVQNRFNSAITNLGNTVNNLSEARSRIEDSDYATEVSNMSRAQILQQAGTSVLAQANQVPQNVLSLLANSENGICYPGDFIDYEELREQLSSVSSFERFEIFPKESSWPNHNTNGVTAACSHEGKSSFYRNLLWLTEKEGSYPKLKNSYVNKKGKEVLVLWGIHHPPNSKEQQNLYQNENAYVSVVTSNYNRRFTPEIAERPKVRDQAGRMNYYWTLLKPGDTIIFEANGNLIAPMYAFALSRG

SEQ ID NO: 93 - protein, 229 aa, Artificial Sequence
  HA1-2his (PR8)
KGIAPLQLGKCNIAGWLLGNPECDPLLPVRSWSYIVETPNSENGICYPGDFIDYEELREQLSSVSSFERFEIFPKESSWPNHNTNGVTAACSHEGKSSFYRNLLWLTEKEGSYPKLKNSYVNKKGKEVLVLWGIHHPPNSKEQQNLYQNENAYVSVVTSNYNRRFTPEIAERPKVRDQAGRMNYYWTLLKPGDTIIFEANGNLIAPMYAFALSRGFGSGIITSHHHHHH

SEQ ID NO: 94 - protein, 611 aa, Artificial Sequence
  STF2.4xM2e
MAQVINTNSLSLLTQNNLNKSQSALGTAIERLSSGLRINSAKDDAAGQAIANRFTANIKGLTQASRNANDGISIAQTTEGALNEINNNLQRVRELAVQSANSTNSQSDLDSIQAEITQRLNEIDRVSGQTQFNGVKVLAQDNTLTIQVGANDGETIDIDLKQINSQTLGLDSLNVQKAYDVKDTAVTTKAYANNGTTLDVSGLDDAAIKAATGGTNGTASVTGGAVKFDADNNKYFVTIGGFTGADAAKNGDYEVNVATDGTVTLAAGATKTTMPAGATTKTEVQELKDTPAVVSADAKNALIAGGVDATDANGAELVKMSYTDKNGKTIEGGYALKAGDKYYAADYDEATGAIKAKTTSYTAADGTTKTAANQLGGVDGKTEVVTIDGKTYNASKAAGHDFKAQPELAEAAAKTTENPLQKIDAALAQVDALRSDLGAVQNRFNSAITNLGNTVNNLSEARSRIEDSDYATEVSNMSRAQILQQAGTSVLAQANQVPQNVLSLLRLSLLTEVETPIRNEWGSRSNDSSDPLESLLTEVETPIRNEWGSRSNDSSDPGSSLLTEVETPIRNEWGSRSNDSSDPELSLLTEVETPIRNEWGSRSNDSSDPSR

SEQ ID NO: 95 - protein, 729 aa, Artificial Sequence
  STF2.HA1-2 (VN)
MAQVINTNSLSLLTQNNLNKSQSALGTAIERLSSGLRINSAKDDAAGQAIANRFTANIKGLTQASRNANDGISIAQTTEGALNEINNNLQRVRELAVQSANSTNSQSDLDSIQAEITQRLNEIDRVSGQTQFNGVKVLAQDNTLTIQVGANDGETIDIDLKQINSQTLGLDSLNVQKAYDVKDTAVTTKAYANNGTTLDVSGLDDAAIKAATGGTNGTASVTGGAVKFDADNNKYFVTIGGFTGADAAKNGDYEVNVATDGTVTLAAGATKTTMPAGATTKTEVQELKDTPAVVSADAKNALIAGGVDATDANGAELVKMSYTDKNGKTIEGGYALKAGDKYYAADYDEATGAIKAKTTSYTAADGTTKTAANQLGGVDGKTEVVTIDGKTYNASKAAGHDFKAQPELAEAAAKTTENPLQKIDAALAQVDALRSDLGAVQNRFNSAITNLGNTVNNLSEARSRIEDSDYATEVSNMSRAQILQQAGTSVLAQANQVPQNVLSLLAGVKPLILRDCSVAGWLLGNPMCDEFINVPEWSYIVEKANPVNDLCYPGDFNDYEELKHLLSRINHFEKIQIIPKSSWSSHEASLGVSSACPYQGKSSFFRNVVWLIKKNSTYPTIKRSYNNTNQEDLLVLWGIHHPNDAAEQTKLYQNPTTYISVGTSTLNQRLVPRIATRSKVNGQSGRMEFFWTILKPNDAINFESNGNFIAPEYAYKIVKKGDSTIMKSE

SEQ ID NO: 96 - protein, 506 aa, Artificial Sequence
  STF2
MAQVINTNSLSLLTQNNLNKSQSALGTAIERLSSGLRINSAKDDAAGQAIANRFTANIKGLTQASRNANDGISIAQTTEGALNEINNNLQRVRELAVQSANSTNSQSDLDSIQAEITQRLNEIDRVSGQTQFNGVKVLAQDNTLTIQVGANDGETIDIDLKQINSQTLGLDSLNVQKAYDVKDTAVTTKAYANNGTTLDVSGLDDAAIKAATGGTNGTASVTGGAVKFDADNNKYFVTIGGFTGADAAKNGDYEVNVATDGTVTLAAGATKTTMPAGATTKTEVQELKDTPAVVSADAKNALIAGGVDATDANGAELVKMSYTDKNGKTIEGGYALKAGDKYYAADYDEATGAIKAKTTSYTAADGTTKTAANQLGGVDGKTEVVTIDGKTYNASKAAGHDFKAQPELAEAAAKTTENPLQKIDAALAQVDALRSDLGAVQNRFNSAITNLGNTVNNLSEARSRIEDSDYATEVSNMSRAQILQQAGTSVLAQANQVPQNVLSLLA

SEQ ID NO: 97 - DNA, 1614 bp, Artificial Sequence
  STF2.B1p.wt
atgaaattcttagtcaacgttgcccttgtttttatggtcgtatacatttcttacatctatgcggcccaggttatcaataccaactccctgtcgttgctcacccaaaataaccttaataaaagccagagcgcactgggaaccgccatagaacgcctctcaagcggcctccggatcaattctgcaaaagacgacgccgccggtcaggccatcgcaaaccgctttaccgccaatatcaagggactgacgcaggcttcgaggaatgctaacgatggaataagcatcgctcaaaccacggagggcgccctgaacgagatcaacaacaacctacagcgcgtcagggagctcgcagtgcagtccgccaattcgaccaactcgcagtcggacctggactcgatccaagccgaaatcacccagcgcctgaatgagattgaccgggtgagcggtcagacacagtttaacggcgtgaaggtacttgcacaggataacacacttacgatacaggtgggcgccaacgatggtgaaaccatagacattgatctcaaacagattaacagccagacgctcgggttggatagcctgaatgtgcaaaaggcgtacgacgtgaaagacacggcggtcactaccaaagcctacgctaacaatggcactaccttggatgtgagcggattggatgatgcagcaatcaaggctgctaccggcggtacgaacggaaccgcgtccgtgaccggcggtgccgtgaagttcgatgctgacaacaataagtatttcgtcaccattggaggctttactggcgccgacgcagcaaagaacggcgactatgaagtgaacgtggcaaccgatggaaccgtgacgctggccgctggtgccaccaagaccaccatgccagccggcgccacaactaagaccgaggtgcaggagttaaaggacacccccgcggtggttagcgcagatgccaaaaacgcgttgatcgccggcggagtggatgcaactgatgctaatggtgcggagctggttaaaatgtcgtatacagacaagaatggtaagacgatcgagggcggttatgcccttaaggcaggagataagtattacgctgctgattacgatgaggcgacgggagctattaaggccaagacaacgtcatacacggcggcggacggaacgactaagacggctgccaatcagttgggaggggttgacgggaagacagaggtcgttacgatcgatggcaagacatacaacgcctccaaggccgctggccacgatttcaaagctcaacccgaactggccgaggccgcggcgaaaacaactgagaacccgttgcagaagattgatgcggccctggcgcaagtagatgccctgcgctcagacctgggcgccgttcaaaatcgattcaattccgcgattacaaacctgggcaatacagtaaacaatctatccgaggccagatcccgcattgaagactccgactacgcgacagaagtaagtaacatgagtcgtgcccagattctgcagcaggccggcactagtgtcctggcccaggccaatcaagtcccgcagaatgtgctgagcctactacgagagttcagtcgttacccagcccaatggcggccgctc

SEQ ID NO: 98 - DNA, 1569 bp, Artificial Sequence
  STF2.B1p.ng
atgaaattcttagtcaacgttgcccttgtttttatggtcgtatacatttcttacatctatgcggcccaagtgatcaacaccaactccctgtccctgctcactcaaaacaacctccagaaatctcagtctgctctcggtactgctatcgagcgtctctcctccggcctgaggatcaactccgctaaagatgacgccgccggacaagctatcgctaaccgctttactgccaacattaaaggcctgacccaagcctctaggaacgccaatgatggcatttctatcgctcaaaccaccgaaggcgccctgaacgaaatcaataataacctgcaacgtgtccgcgaactcgccgtccagtccgcccaatctaccaactctcagtctgacctggactctatccaagctgagatcacccaaaggctcaacgagatcgatcgtgtgtctggtcaaactcagtttaacggcgtcaaagtgctggctcaagacaacacactcaccatccaagtaggagccaatgacggcgagacaatcgatatcgacctgaagcagatcaattctcaaactctgggcctggactccctgaacgtccaaaaggcttacgacgtgaaggacaccgctgtgacaaccaaagcctatgctaatcaaggaacaaccctggacgtgtccggactcgatgacgccgctatcaaggccgctactggcggcactcagggaactgcctctgtgaccggaggcgctgtgaagttcgacgccgataacaacaaatacttcgtcactattggtggtttcactggcgctgacgccgctaagaacggtgactacgaggtcaacgtcgccactgacggaacagtgacactggccgctggcgctaccaagaccacaatgcctgctggtgctactactaagacagaggtgcaggaactcaaggacacccctgccgtggtgtccgccgatgctaagaacgctctcattgctggtggtgtcgacgctacggacgccaacggagccgagcttgtgaaaatgtcctacaccgacaagaacggaaagactatcgagggaggttacgctctgaaggctggcgataagtactacgccgctgattatgacgaagctacaggcgccattaaagctaaaaccacatcttataccgctgccgatggtactaccaagactgctgccaatcagctgggtggagtcgatggaaaaaccgaagtggtcacaatcgacggaaagacctatcaagcctccaaggctgctggccacgacttcaaggcccaacccgaactggccgaggctgctgctaaaaccactgaaaaccccctgcagaaaattgacgctgccctggcccaagtggatgccctccgctccgacctcggcgctgtgcaaaaccgcttcaactccgctattacaaacctcggcaataccgtcaatcagctctctgaagctaggtctcgtattgaggattccgattacgctaccgaggtctcccagatgtcccgtgcccaaattctccaacaagccggcacctccgtcctcgcccaagccaatcaggtgccacagaatgtgctgagc

SEQ ID NO: 99 - DNA, 63 bp, Artificial Sequence
  Honey Bee mellitin
atgaaattcttagtcaacgttgcccttgtttttatggtcgtatacatttcttacatctatgcg

SEQ ID NO: 100 - DNA, 3156 bp, Artificial Sequence
  STF2.HA0s
atgaaattcttagtcaacgttgcccttgtttttatggtcgtatacatttcttacatctatgcggcccaggttatcaataccaactccctgtcgttgctcacccaaaataaccttaataaaagccagagcgcactgggaaccgccatagaacgcctctcaagcggcctccggatcaattctgcaaaagacgacgccgccggtcaggccatcgcaaaccgctttaccgccaatatcaagggactgacgcaggcttcgaggaatgctaacgatggaataagcatcgctcaaaccacggagggcgccctgaacgagatcaacaacaacctacagcgcgtcagggagctcgcagtgcagtccgccaattcgaccaactcgcagtcggacctggactcgatccaagccgaaatcacccagcgcctgaatgagattgaccgggtgagcggtcagacacagtttaacggcgtgaaggtacttgcacaggataacacacttacgatacaggtgggcgccaacgatggtgaaaccatagacattgatctcaaacagattaacagccagacgctcgggttggatagcctgaatgtgcaaaaggcgtacgacgtgaaagacacggcggtcactaccaaagcctacgctaacaatggcactaccttggatgtgagcggattggatgatgcagcaatcaaggctgctaccggcggtacgaacggaaccgcgtccgtgaccggcggtgccgtgaagttcgatgctgacaacaataagtatttcgtcaccattggaggctttactggcgccgacgcagcaaagaacggcgactatgaagtgaacgtggcaaccgatggaaccgtgacgctggccgctggtgccaccaagaccaccatgccagccggcgccacaactaagaccgaggtgcaggagttaaaggacacccccgcggtggttagcgcagatgccaaaaacgccttgatcgccggcggagtggatgcaactgatgctaatggtgcggagctggttaaaatgtcgtatacagacaagaatggtaagacgatcgagggcggttatgcccttaaggcaggagataagtattacgctgctgattacgatgaggcgacgggagctattaaggccaagacaacgtcatacacggcggcggacggaacgactaagacggctgccaatcagttgggaggggttgacgggaagacagaggtcgttacgatcgatggcaagacatacaacgcttccaaggccgctggccacgatttcaaagctcaacccgaactggccgaggccgcggcgaaaacaactgagaacccgttgcagaagattgatgcggccctggcgcaagtagatgccctgcgctcagacctgggcgccgttcaaaatcgattcaattccgcgattacaaacctgggcaatacagtaaacaatctatccgaggccagatcccgcattgaagactccgactacgcgacagaagtaagtaacatgagtcgtgcccagattctgcagcaggccggcactagtgtcctggcccaggccaatcaagtcccgcagaatgtgctgagcctactagcatcaggttccggctcaggttccgacaccatttgcattggataccatgcaaacaactcaaccgatactgttgataccgtccttgagaagaacgttaccgtcacgcactcggtcaacctattagaggatagccacaacggaaagctgtgccgtctgaaaggcatagcgccactgcagctcggcaaatgtaacatcgcaggttggctccttggtaacccggagtgcgaccccctcctccctgtacgatcctggagttatatcgtggagacccccaatagcgagaacggaatttgctacccaggagatttcatagactacgaggagttgcgcgagcagctttcgtctgtgagcagcttcgaaaggttcgagatattcccgaaggagagcagctggccgaatcataacactaacggtgtgacagccgcctgcagtcatgaaggaaagagttcattctatcgcaacctgctgtggttgacggagaaagagggcagctaccctaagttgaagaactcctatgtgaacaaaaaaggcaaggaggttctggtgctgtggggcatacaccacccccccaatagcaaggagcagcagaatctgtaccaaaacgagaatgcctatgtgagcgtggtcactagtaactataaccgtcggttcactcccgagatcgccgagcgtccgaaggtgagggaccaggcaggccggatgaactactactggaccctattgaagccaggggacacgattatcttcgaggcaaacggaaacctcatagcgccgatgtacgccttcgccctgagccgtggctttggatcggggatcatcacgtctaacgcctcgatgcacgaatgtaataccaaatgccagaccccactgggtgctatcaactcgtccttaccctatcaaaatatacatccggtcaccataggcgagtgtcccaaatatgtcagatccgccaagttgcggatggtgaccggcctccgcaatattcctagtattcagtcacgcggcttgttcggcgccatcgctggtttcatcgaaggcgggtggacaggcatgattgatggctggtatggctatcaccaccagaacgagcagggctcgggctacgcggctgaccagaagtcgactcagaatgccatcaatggcatcacgaataaggtgaacacggtcattgaaaagatgaacattcaatttacagccgtaggaaaagagtttaataaactggaaaaaagaatggagaatctgaataagaaggtggacgacggatttttggacatctggacgtacaacgccgagctgctggttctgctggaaaatgagcgaacactggattttcatgattctaacgtaaagaatctgtacgagaaggtgaagtcccaactaaagaataatgccaaggaaatcggaaatggatgctttgagttttaccacaagtgcgataatgagtgcatggaatccgtgcgaaatggtacatacgattacccaaagtactccgaagaatccaagctaaatcgcgaaaaggttgatggtgttaaacttgaatccatgggtatttaccaacaccatcatcaccaccattaatag

SEQ ID NO: 101 - DNA, 67 bp, Artificial Sequence
  FOR PRIMER
agtcgctgagcctactagcatcaggttccggctcaggttccgacaccatttgcattggataccatgc

SEQ ID NO: 102 - DNA, 55 bp, Artificial Sequence
  REV PRIMER
agtcgcatgcctattaatggtggtgatgatggtgttggtaaatacccatggattc

SEQ ID NO: 103 - DNA, 1557 bp, Artificial Sequence
  HA0s PR8
gacaccatttgcattggataccatgcaaacaactcaaccgatactgttgataccgtccttgagaagaacgttaccgtcacgcactcggtcaacctattagaggatagccacaacggaaagctgtgccgtctgaaaggcatagcgccactgcagctcggcaaatgtaacatcgcaggttggctccttggtaacccggagtgcgaccccctcctccctgtacgatcctggagttatatcgtggagacccccaatagcgagaacggaatttgctacccaggagatttcatagactacgaggagttgcgcgagcagctttcgtctgtgagcagcttcgaaaggttcgagatattcccgaaggagagcagctggccgaatcataacactaacggtgtgacagccgcctgcagtcatgaaggaaagagttcattctatcgcaacctgctgtggttgacggagaaagagggcagctaccctaagttgaagaactcctatgtgaacaaaaaaggcaaggaggttctggtgctgtggggcatacaccacccccccaatagcaaggagcagcagaatctgtaccaaaacgagaatgcctatgtgagcgtggtcactagtaactataaccgtcggttcactcccgagatcgccgagcgtccgaaggtgagggaccaggcaggccggatgaactactactggaccctattgaagccaggggacacgattatcttcgaggcaaacggaaacctcatagcgccgatgtacgccttcgccctgagccgtggctttggatcggggatcatcacgtctaacgcctcgatgcacgaatgtaataccaaatgccagaccccactgggtgctatcaactcgtccttaccctatcaaaatatacatccggtcaccataggcgagtgtcccaaatatgtcagatccgccaagttgcggatggtgaccggcctccgcaatattcctagtattcagtcacgcggcttgttcggcgccatcgctggtttcatcgaaggcgggtggacaggcatgattgatggctggtatggctatcaccaccagaacgagcagggctcgggctacgcggctgaccagaagtcgactcagaatgccatcaatggcatcacgaataaggtgaacacggtcattgaaaagatgaacattcaatttacagccgtaggaaaagagtttaataaactggaaaaaagaatggagaatctgaataagaaggtggacgacggatttttggacatctggacgtacaacgccgagctgctggttctgctggaaaatgagcgaacactggattttcatgattctaacgtaaagaatctgtacgagaaggtgaagtcccaactaaagaataatgccaaggaaatcggaaatggatgctttgagttttaccacaagtgcgataatgagtgcatggaatccgtgcgaaatggtacatacgattacccaaagtactccgaagaatccaagctaaatcgcgaaaaggttgatggtgttaaacttgaatccatgggtatttaccaacaccatcatcaccaccattaatag

SEQ ID NO: 104 - DNA, 2439 bp, Artificial Sequence
  STF2.HA1-1
atgaaattcttagtcaacgttgcccttgtttttatggtcgtatacatttcttacatctatgcggcccaggttatcaataccaactccctgtcgttgctcacccaaaataaccttaataaaagccagagcgcactgggaaccgccatagaacgcctctcaagcggcctccggatcaattctgcaaaagacgacgccgccggtcaggccatcgcaaaccgctttaccgccaatatcaagggactgacgcaggcttcgaggaatgctaacgatggaataagcatcgctcaaaccacggagggcgccctgaacgagatcaacaacaacctacagcgcgtcagggagctcgcagtgcagtccgccaattcgaccaactcgcagtcggacctggactcgatccaagccgaaatcacccagcgcctgaatgagattgaccgggtgagcggtcagacacagtttaacggcgtgaaggtacttgcacaggataacacacttacgatacaggtgggcgccaacgatggtgaaaccatagacattgatctcaaacagattaacagccagacgctcgggttggatagcctgaatgtgcaaaaggcgtacgacgtgaaagacacggcggtcactaccaaagcctacgctaacaatggcactaccttggatgtgagcggattggatgatgcagcaatcaaggctgctaccggcggtacgaacggaaccgcgtccgtgaccggcggtgccgtgaagttcgatgctgacaacaataagtatttcgtcaccattggaggctttactggcgccgacgcagcaaagaacggcgactatgaagtgaacgtggcaaccgatggaaccgtgacgctggccgctggtgccaccaagaccaccatgccagccggcgccacaactaagaccgaggtgcaggagttaaaggacacccccgcggtggttagcgcagatgccaaaaacgccttgatcgccggcggagtggatgcaactgatgctaatggtgcggagctggttaaaatgtcgtatacagacaagaatggtaagacgatcgagggcggttatgcccttaaggcaggagataagtattacgctgctgattacgatgaggcgacgggagctattaaggccaagacaacgtcatacacggcggcggacggaacgactaagacggctgccaatcagttgggaggggttgacgggaagacagaggtcgttacgatcgatggcaagacatacaacgcttccaaggccgctggccacgatttcaaagctcaacccgaactggccgaggccgcggcgaaaacaactgagaacccgttgcagaagattgatgcggccctggcgcaagtagatgccctgcgctcagacctgggcgccgttcaaaatcgattcaattccgcgattacaaacctgggcaatacagtaaacaatctatccgaggccagatcccgcattgaagactccgactacgcgacagaagtaagtaacatgagtcgtgcccagattctgcagcaggccggcactagtgtcctggcccaggccaatcaagtcccgcagaatgtgctgagcctactagcatcaggttccggctcaggttccagccacaacggaaagctgtgccgtctgaaaggcatagcgccactgcagctcggcaaatgtaacatcgcaggttggctccttggtaacccggagtgcgaccccctcctccctgtacgatcctggagttatatcgtggagacccccaatagcgagaacggaatttgctacccaggagatttcatagactacgaggagttgcgcgagcagctttcgtctgtgagcagcttcgaaaggttcgagatattcccgaaggagagcagctggccgaatcataacactaacggtgtgacagccgcctgcagtcatgaaggaaagagttcattctatcgcaacctgctgtggttgacggagaaagagggcagctaccctaagttgaagaactcctatgtgaacaaaaaaggcaaggaggttctggtgctgtggggcatacaccacccccccaatagcaaggagcagcagaatctgtaccaaaacgagaatgcctatgtgagcgtggtcactagtaactataaccgtcggttcactcccgagatcgccgagcgtccgaaggtgagggaccaggcaggccggatgaactactactggaccctattgaagccaggggacacgattatcttcgaggcaaacggaaacctcatagcgccgatgtacgccttcgccctgagccgtggctttggatcggggatcatcacgtctaacgcctcgatgcacgaatgtaataccaaatgccagaccccactgggtgctatcaactcgtccttaccctatcaaaatatacatccggtcaccataggcgagtgtcccaaatatgtcagacaccatcatcaccaccattaatag

SEQ ID NO: 105 - DNA, 66 bp, Artificial Sequence
  FOR PRIMER
agtcgctgagcctactagcatcaggttccggctcaggttccagccacaacggaaagctgtgccgtc

SEQ ID NO: 106 - DNA, 67 bp, Artificial Sequence
  REV PRIMER
agtcgcatgcctattaatggtggtgatgatggtgtctgacatatttgggacactcgcctatggtgac

SEQ ID NO: 107 - DNA, 2292 bp, Artificial Sequence
  STF2.HA1-2
atgaaattcttagtcaacgttgcccttgtttttatggtcgtatacatttcttacatctatgcggcccaggttatcaataccaactccctgtcgttgctcacccaaaataaccttaataaaagccagagcgcactgggaaccgccatagaacgcctctcaagcggcctccggatcaattctgcaaaagacgacgccgccggtcaggccatcgcaaaccgctttaccgccaatatcaagggactgacgcaggcttcgaggaatgctaacgatgggataagcatcgctcaaaccacggagggcgccctgaacgagatcaacaacaacctacagcgcgtcagggagctcgcagtgcagtccgccaattcgaccaactcgcagtcggacctggactcgatccaagccgaaatcacccagcgcctgaacgagattgaccgggtgagcggtcagacacagtttaacggcgtgaaggtacttgcgcaggataacacacttacgatacaggtgggcgccaacgatggtgaaaccatagacattgatctcaaacagattaacagccagacgctcgggttggatagcctgaatgtgcaaaaggcgtacgacgtgaaagacacggcggtcactaccaaagcctacgctaacaatggcactaccttggatgtgagcggattggatgatgcagcaatcaaggctgctaccggcggtacgaacggaaccgcgtccgtgaccggcggtgccgtgaagttcgatgctgacaacaataagtatttcgtcaccattggaggctttactggcgccgacgcagcaaagaacggcgactatgaagtgaacgtggcaaccgatggaaccgtgacgctggccgctggtgccaccaagaccaccatgccagccggcgccacaactaagaccgaggtgcaggagttaaaggacacccccgcggtggttagcgcagatgccaaaaacgcgttgatcgccggcggagtggatgcaactgatgctaatggtgcggagctggttaaaatgtcgtatacagacaagaatggtaagacgatcgagggcggttatgcccttaaggcaggagataagtattacgctgctgattacgatgaggcgacgggagctattaaggccaagacaacgtcatacacggcggcggacggaacgactaagacggctgccaatcagttgggaggggttgacgggaagacagaggtcgttacgatcgatggcaagacatacaacgcctccaaggccgctggccacgatttcaaagctcaacccgaactggccgaggccgcggcgaaaacaactgagaacccgttgcagaagattgatgcggccctggcgcaagtagatgccctgcgctcagacctgggcgccgttcaaaatcgattcaattccgcgattacaaacctgggcaatacagtaaacaatctatccgaggccagatcccgcattgaagactccgactacgcgacagaagtaagtaacatgagtcgtgcccagattctgcagcaggccggcactagtgtcctggcccaggccaatcaagtcccgcagaatgtgctgagcctactagcatcaggttccggctcaggttccaaaggcatagcgccactgcagctcggcaaatgtaacatcgcaggttggctccttggtaacccggagtgcgaccccctcctccctgtacgatcctggagttatatcgtggagacccccaatagcgagaacggaatttgctacccaggagatttcatagactacgaggagttgcgcgagcagctttcgtctgtgagcagcttcgagaggttcgaaatcttcccgaaggagagcagctggccgaatcataacactaacggtgtgacagccgcctgcagtcatgaaggaaagagttcattctatcgcaacctgctgtggttgacggagaaagagggcagctaccctaagttgaagaactcctatgtgaacaaaaaaggcaaggaggttctggtgctgtggggcatacaccacccccccaatagcaaggagcagcagaatctgtaccaaaacgagaatgcctatgtgagcgtggtcactagtaactataaccgtcggttcactcccgagatcgccgagcgtccgaaggtgagggaccaggcaggccggatgaactactactggaccctattgaagccaggggacacgattatcttcgaggcaaacggaaacctcatagcgccgatgtacgcgttcgccctgagccgtggctttggatcggggatcatcacgtctcaccatcatcaccaccattaatag

SEQ ID NO: 108 - DNA, 66 bp, Artificial Sequence
  FOR PRIMER
agtcgctgagcctactagcatcaggttccggctcaggttccaaaggcatagcgccactgcagctcg

SEQ ID NO: 109 - DNA, 70 bp, Artificial Sequence
  REV PRIMER
agtcgcatgcctattaatggtggtgatgatggtgagacgtgatgatccccgatccaaagccacggctcag

SEQ ID NO: 110 - DNA, 2292 bp, Artificial Sequence
  STF2.HA1-2mut
atgaaattcttagtcaacgttgcccttgtttttatggtcgtatacatttcttacatctatgcggcccaggttatcaataccaactccctgtcgttgctcacccaaaataaccttaataaaagccagagcgcactgggaaccgccatagaacgcctctcaagcggcctccggatcaattctgcaaaagacgacgccgccggtcaggccatcgcaaaccgctttaccgccaatatcaagggactgacgcaggcttcgaggaatgctaacgatggaataagcatcgctcaaaccacggagggcgccctgaacgagatcaacaacaacctacagcgcgtcagggagctcgcagtgcagtccgccaattcgaccaactcgcagtcggacctggactcgatccaagccgaaatcacccagcgcctgaatgagattgaccgggtgagcggtcagacacagtttaacggcgtgaaggtacttgcacaggataacacacttacgatacaggtgggcgccaacgatggtgaaaccatagacattgatctcaaacagattaacagccagacgctcgggttggatagcctgaatgtgcaaaaggcgtacgacgtgaaagacacggcggtcactaccaaagcctacgctaacaatggcactaccttggatgtgagcggattggatgatgcagcaatcaaggctgctaccggcggtacgaacggaaccgcgtccgtgaccggcggtgccgtgaagttcgatgctgacaacaataagtatttcgtcaccattggaggctttactggcgccgacgcagcaaagaacggcgactatgaagtgaacgtggcaaccgatggaaccgtgacgctggccgctggtgccaccaagaccaccatgccagccggcgccacaactaagaccgaggtgcaggagttaaaggacacccccgcggtggttagcgcagatgccaaaaacgcgttgatcgccggcggagtggatgcaactgatgctaatggtgcggagctggttaaaatgtcgtatacagacaagaatggtaagacgatcgagggcggttatgcccttaaggcaggagataagtattacgctgctgattacgatgaggcgacgggagctattaaggccaagacaacgtcatacacggcggcggacggaacgactaagacggctgccaatcagttgggaggggttgacgggaagacagaggtcgttacgatcgatggcaagacatacaacgcctccaaggccgctggccacgatttcaaagctcaacccgaactggccgaggccgcggcgaaaacaactgagaacccgttgcagaagattgatgcggccctggcgcaagtagatgccctgcgctcagacctgggcgccgttcaaaatcgattcaattccgcgattacaaacctgggcaatacagtaaacaatctatccgaggccagatcccgcattgaagactccgactacgcgacagaagtaagtaacatgagtcgtgcccagattctgcagcaggccggcactagtgtcctggcccaggccaatcaagtcccgcagaatgtgctgagcctgctggcttctggatctggatctggttctaaaggcgctgcccctctgcaactcggcaagtgcaatattgcggggtggctgttgggcaacccagaatgtgaccccctcctgcccgtccgttcttggtctgacatcgctgaaacacctaactccgagaacggcatctgttacccgggcgacttcattgactacgaggagctccgcgaacagctgtcttctgtctcttctttcgaacgtttcgaaattttcccaaaggaatcctcctggccaaaccataacaccaacggagtgaccgccgcctgtagccatgagggcaagtcttctttctaccgtaatctgctgtggctgactgaaaaagagggttcttatcccaaactgaagaactcttatgtcaacaagaagggcaaagaggtcctggtgctgtggggtatccaccacccccccaactccaaggagcagcagaatctgtaccaaaacgaaaatgcttacgtgtctgtcgtgacatctaactacaaccggcgcttcacgcccgaaatcgccgagcgtcccaaagtgcgcgatcaggccggaaggatgaactactactggaccctgctcaaacccggagataccatcatattcgaagccaatggcaatctcatcgctcccatgtatgctttcgctctctctcgcggattcggttccggcataatcactagccaccaccaccaccaccactaatag

SEQ ID NO: 111 - DNA, 692 bp, Artificial Sequence
  HA1-2mut
aaggcgctgcccctctgcaactcggcaagtgcaatattgcggggtggctgttgggcaacccagaatgtgaccccctcctgcccgtccgttcttggtctgacatcgctgaaacacctaactccgagaacggcatctgttacccgggcgacttcattgactacgaggagctccgcgaacagctgtcttctgtctcttctttcgaacgtttcgaaattttcccaaaggaatcctcctggccaaaccataacaccaacggagtgaccgccgcctgtagccatgagggcaagtcttctttctaccgtaatctgctgtggctgactgaaaaagagggttcttatcccaaactgaagaactcttatgtcaacaagaagggcaaagaggtcctggtgctgtggggtatccaccacccccccaactccaaggagcagcagaatctgtaccaaaacgaaaatgcttacgtgtctgtcgtgacatctaactacaaccggcgcttcacgcccgaaatcgccgagcgtcccaaagtgcgcgatcaggccggaaggatgaactactactggaccctgctcaaacccggagataccatcatattcgaagccaatggcaatctcatcgctcccatgtatgctttcgctctctctcgcggattcggttccggcataatcactagccaccaccaccaccaccactaatag

SEQ ID NO: 112 - DNA, 2151 bp, Artificial Sequence
  STF2.HA1-3
atgaaattcttagtcaacgttgcccttgtttttatggtcgtatacatttcttacatctatgcggcccaggttatcaataccaactccctgtcgttgctcacccaaaataaccttaataaaagccagagcgcactgggaaccgccatagaacgcctctcaagcggcctccggatcaattctgcaaaagacgacgccgccggtcaggccatcgcaaaccgctttaccgccaatatcaagggactgacgcaggcttcgaggaatgctaacgatgggataagcatcgctcaaaccacggagggcgccctgaacgagatcaacaacaacctacagcgcgtcagggagctcgcagtgcagtccgccaattcgaccaactcgcagtcggacctggactcgatccaagccgaaatcacccagcgcctgaacgagattgaccgggtgagcggtcagacacagtttaacggcgtgaaggtacttgcgcaggataacacacttacgatacaggtgggcgccaacgatggtgaaaccatagacattgatctcaaacagattaacagccagacgctcgggttggatagcctgaatgtgcaaaaggcgtacgacgtgaaagacacggcggtcactaccaaagcctacgctaacaatggcactaccttggatgtgagcggattggatgatgcagcaatcaaggctgctaccggcggtacgaacggaaccgcgtccgtgaccggcggtgccgtgaagttcgatgctgacaacaataagtatttcgtcaccattggaggctttactggcgccgacgcagcaaagaacggcgactatgaagtgaacgtggcaaccgatggaaccgtgacgctggccgctggtgccaccaagaccaccatgccagccggcgccacaactaagaccgaggtgcaggagttaaaggacacccccgcggtggttagcgcagatgccaaaaacgcgttgatcgccggcggagtggatgcaactgatgctaatggtgcggagctggttaaaatgtcgtatacagacaagaatggtaagacgatcgagggcggttatgcccttaaggcaggagataagtattacgctgctgattacgatgaggcgacgggagctattaaggccaagacaacgtcatacacggcggcggacggaacgactaagacggctgccaatcagttgggaggggttgacgggaagacagaggtcgttacgatcgatggcaagacatacaacgcctccaaggccgctggccacgatttcaaagctcaacccgaactggccgaggccgcggcgaaaacaactgagaacccgttgcagaagattgatgcggccctggcgcaagtagatgccctgcgctcagacctgggcgccgttcaaaatcgattcaattccgcgattacaaacctgggcaatacagtaaacaatctatccgaggccagatcccgcattgaagactccgactacgcgacagaagtaagtaacatgagtcgtgcccagattctgcagcaggccggcactagtgtcctggcccaggccaatcaagtcccgcagaatgtgctgagcctactagcatcaggttccggctcaggttccaatagcgagaacggaatttgctacccaggagatttcatagactacgaggagttgcgcgagcagctttcgtctgtgagcagcttcgagaggttcgaaatcttcccgaaggagagcagctggccgaatcataacactaacggtgtgacagccgcctgcagtcatgaaggaaagagttcattctatcgcaacctgctgtggttgacggagaaggagggcagctaccctaagctgaagaactcctatgtgaacaaaaaaggcaaggaggttctggtgctgtggggcatacaccacccccccaatagcaaggagcagcagaatctgtaccaaaacgagaatgcctatgtgagcgtggtcactagtaactataaccgtcggttcactcccgagatcgccgagcgtccgaaggtgagggaccaggcaggccggatgaactactactggaccctattgaagccaggggacacgattatcttcgaggcaaacggaaacctcatagcgccgatgtacgccttcgccctgagccgtggccaccatcatcaccaccattaatag

SEQ ID NO: 113 - DNA, 66 bp, Artificial Sequence
  FOR PRIMER
agtcgctgagcctactagcatcaggttccggctcaggttccaatagcgagaacggaatttgctacc

SEQ ID NO: 114 - DNA, 54 bp, Artificial Sequence
  REV PRIMER
agtcgcatgcctattaatggtggtgatgatggtggccacggctcagggcgaagg

SEQ ID NO: 115 - DNA, 2151 bp, Artificial Sequence
  STF2.HA1-3mut
atgaaattcttagtcaacgttgcccttgtttttatggtcgtatacatttcttacatctatgcggcccaggttatcaataccaactccctgtcgttgctcacccaaaataaccttaataaaagccagagcgcactgggaaccgccatagaacgcctctcaagcggcctccggatcaattctgcaaaagacgacgccgccggtcaggccatcgcaaaccgctttaccgccaatatcaagggactgacgcaggcttcgaggaatgctaacgatggaataagcatcgctcaaaccacggagggcgccctgaacgagatcaacaacaacctacagcgcgtcagggagctcgcagtgcagtccgccaattcgaccaactcgcagtcggacctggactcgatccaagccgaaatcacccagcgcctgaatgagattgaccgggtgagcggtcagacacagtttaacggcgtgaaggtacttgcacaggataacacacttacgatacaggtgggcgccaacgatggtgaaaccatagacattgatctcaaacagattaacagccagacgctcgggttggatagcctgaatgtgcaaaaggcgtacgacgtgaaagacacggcggtcactaccaaagcctacgctaacaatggcactaccttggatgtgagcggattggatgatgcagcaatcaaggctgctaccggcggtacgaacggaaccgcgtccgtgaccggcggtgccgtgaagttcgatgctgacaacaataagtatttcgtcaccattggaggctttactggcgccgacgcagcaaagaacggcgactatgaagtgaacgtggcaaccgatggaaccgtgacgctggccgctggtgccaccaagaccaccatgccagccggcgccacaactaagaccgaggtgcaggagttaaaggacacccccgcggtggttagcgcagatgccaaaaacgcgttgatcgccggcggagtggatgcaactgatgctaatggtgcggagctggttaaaatgtcgtatacagacaagaatggtaagacgatcgagggcggttatgcccttaaggcaggagataagtattacgctgctgattacgatgaggcgacgggagctattaaggccaagacaacgtcatacacggcggcggacggaacgactaagacggctgccaatcagttgggaggggttgacgggaagacagaggtcgttacgatcgatggcaagacatacaacgcctccaaggccgctggccacgatttcaaagctcaacccgaactggccgaggccgcggcgaaaacaactgagaacccgttgcagaagattgatgcggccctggcgcaagtagatgccctgcgctcagacctgggcgccgttcaaaatcgattcaattccgcgattacaaacctgggcaatacagtaaacaatctatccgaggccagatcccgcattgaagactccgactacgcgacagaagtaagtaacatgagtcgtgcccagattctgcagcaggccggcactagtgtcctggcccaggccaatcaagtcccgcagaatgtgctgagcctgctggcttctggatctggatctggttctaactccgagaacgaaatctgttacccgggcgacttcattgacaaagaggagctccgcgaacagctgtcttctgtctcttctttcgaacgtttcgaaattttcccaaaggaatcctcctggccaaaccataacaccaacggagtgaccgccgcctgtagccatgagggcaagtcttctttctaccgtaatctgctgtggctgactgaaaaagagggttcttatcccaaactgaagaactcttatgtcaacaagaagggcaaagaggtcctggtgctgtggggtatccaccacccccccaactccaaggagcagcagaatctgtaccaaaacgaaaatgcttacgtgtctgtcgtgacatctaactacaaccggcgcttcacgcccgaaatcgccgagcgtcccaaagtgcgcgatcaggccggaaggatgaactactactggaccctgctcaaacccggagataccatcatattcgaagccaatggcaatctcatcgctcccatgtatgctgctgctctctctcgcggacaccaccaccaccaccactaatag

SEQ ID NO: 116 - DNA, 552 bp, Artificial Sequence
  HA1-3mut PR8
aactccgagaacgaaatctgttacccgggcgacttcattgacaaagaggagctccgcgaacagctgtcttctgtctcttctttcgaacgtttcgaaattttcccaaaggaatcctcctggccaaaccataacaccaacggagtgaccgccgcctgtagccatgagggcaagtcttctttctaccgtaatctgctgtggctgactgaaaaagagggttcttatcccaaactgaagaactcttatgtcaacaagaagggcaaagaggtcctggtgctgtggggtatccaccacccccccaactccaaggagcagcagaatctgtaccaaaacgaaaatgcttacgtgtctgtcgtgacatctaactacaaccggcgcttcacgcccgaaatcgccgagcgtcccaaagtgcgcgatcaggccggaaggatgaactactactggaccctgctcaaacccggagataccatcatattcgaagccaatggcaatctcatcgctcccatgtatgctgctgctctctctcgcggacaccaccaccaccaccactaatag

SEQ ID NO: 117 - DNA, 3156 bp, Artificial Sequence
  ngSTF2.HA0s
atgaaattcttagtcaacgttgcccttgtttttatggtcgtatacatttcttacatctatgcggcccaagtgatcaacaccaactccctgtccctgctcactcaaaacaacctccagaaatctcagtctgctctcggtactgctatcgagcgtctctcctccggcctgaggatcaactccgctaaagatgacgccgccggacaagctatcgctaaccgctttactgccaacattaaaggcctgacccaagcctctaggaacgccaatgatggcatttctatcgctcaaaccaccgaaggcgccctgaacgaaatcaataataacctgcaacgtgtccgcgaactcgccgtccagtccgcccaatctaccaactctcagtctgacctggactctatccaagctgagatcacccaaaggctcaacgagatcgatcgtgtgtctggtcaaactcagtttaacggcgtcaaagtgctggctcaagacaacacactcaccatccaagtaggagccaatgacggcgagacaatcgatatcgacctgaagcagatcaattctcaaactctgggcctggactccctgaacgtccaaaaggcttacgacgtgaaggacaccgctgtgacaaccaaagcctatgctaatcaaggaacaaccctggacgtgtccggactcgatgacgccgctatcaaggccgctactggcggcactcagggaactgcctctgtgaccggaggcgctgtgaagttcgacgccgataacaacaaatacttcgtcactattggtggtttcactggcgctgacgccgctaagaacggtgactacgaggtcaacgtcgccactgacggaacagtgacactggccgctggcgctaccaagaccacaatgcctgctggtgctactactaagacagaggtgcaggaactcaaggacacccctgccgtggtgtccgccgatgctaagaacgctctcattgctggtggtgtcgacgctacggacgccaacggagccgagcttgtgaaaatgtcctacaccgacaagaacggaaagactatcgagggaggttacgctctgaaggctggcgataagtactacgccgctgattatgacgaagctacaggcgccattaaagctaaaaccacatcttataccgctgccgatggtactaccaagactgctgccaatcagctgggtggagtcgatggaaaaaccgaagtggtcacaatcgacggaaagacctatcaagcctccaaggctgctggccacgacttcaaggcccaacccgaactggccgaggctgctgctaaaaccactgaaaaccccctgcagaaaattgacgctgccctggcccaagtggatgccctccgctccgacctcggcgctgtgcaaaaccgcttcaactccgctattacaaacctcggcaataccgtcaatcaactctctgaagctaggtctcgtattgaggattccgattacgctaccgaggtctcccagatgtcccgtgcccaaattctccaacaagccggcacctccgtcctcgcccaagccaatcaggtgccacagaatgtgctgagcctgctggcttctggatctggatctggttctgacaccatctgcattggctaccatgcccagcagtctacagatacagtcgataccgtcctggagaaacaagtcaccgtcacgcactccgtgaacctcctggaggactcccataatggcaaattgtgtcggctgaaaggcatcgcccctctgcaactcggcaagtgcaatattgcggggtggctgttgggcaacccagaatgtgaccccctcctgcccgtccgttcttggtcttacatcgtggaaacacctaactccgagaacggcatctgttacccgggcgacttcattgactacgaggagctccgcgaacagctgtcttctgtctcttctttcgaacgtttcgaaattttcccaaaggaatcctcctggccaaaccataacaccaacggagtgaccgccgcctgtagccatgagggcaagtcttctttctaccgtaatctgctgtggctgactgaaaaagagggttcttatcccaaactgaagaactcttatgtcaacaagaagggcaaagaggtcctggtgctgtggggtatccaccacccccccaactccaaggagcagcagaatctgtaccaaaacgaaaatgcttacgtgtctgtcgtgacatctaactacaaccggcgcttcacgcccgaaatcgccgagcgtcccaaagtgcgcgatcaggccggaaggatgaactactactggaccctgctcaaacccggagataccatcatattcgaagccaatggcaatctcatcgctcccatgtatgctttcgctctctctcgcggattcggttccggcataatcactagccaagcctccatgcacgagtgcaataccaagtgtcaaactccactgggagccattcaaagctccctgccctaccaaaacatccatcctgtgaccattggagagtgccctaaatacgtgcgcagcgcgaaactgcgcatggtgaccggtctccgcaatataccctccatacaatcgcgcggcctgtttggtgctatcgctggctttatcgagggaggatggactggaatgatcgacggctggtatggctatcatcatcaaaacgaacagggttccggctacgccgctgaccaaaagtccactcaaaacgccattaacggtattacaaacaaagtaaacaccgtgatagagaaaatgaatatccaattcactgccgtgggcaaagagtttaacaagctggagaagcgcatggaaaatctgaacaaaaaagtcgatgatggcttcctcgacatctggacttacaacgccgaactcctcgtgctgctcgaaaacgagaggactctggacttccacgactccaacgtgaagaacctgtacgagaaagtcaaatcccaactcaagaacaacgccaaagaaatcggcaacggctgcttcgagttctaccacaaatgtgataacgagtgtatggaatccgtacggcaaggcacttacgactaccccaaatacagcgaagagagcaaattgaaccgcgagaaagtggacggcgtgaaactggagtccatgggcatctatcagcaccaccaccaccaccactaatag

SEQ ID NO: 118 - DNA, 1557 bp, Artificial Sequence
  ngHA0s
gacaccatctgcattggctaccatgcccagcagtctacagatacagtcgataccgtcctggagaaacaagtcaccgtcacgcactccgtgaacctcctggaggactcccataatggcaaattgtgtcggctgaaaggcatcgcccctctgcaactcggcaagtgcaatattgcggggtggctgttgggcaacccagaatgtgaccccctcctgcccgtccgttcttggtcttacatcgtggaaacacctaactccgagaacggcatctgttacccgggcgacttcattgactacgaggagctccgcgaacagctgtcttctgtctcttctttcgaacgtttcgaaattttcccaaaggaatcctcctggccaaaccataacaccaacggagtgaccgccgcctgtagccatgagggcaagtcttctttctaccgtaatctgctgtggctgactgaaaaagagggttcttatcccaaactgaagaactcttatgtcaacaagaagggcaaagaggtcctggtgctgtggggtatccaccacccccccaactccaaggagcagcagaatctgtaccaaaacgaaaatgcttacgtgtctgtcgtgacatctaactacaaccggcgcttcacgcccgaaatcgccgagcgtcccaaagtgcgcgatcaggccggaaggatgaactactactggaccctgctcaaacccggagataccatcatattcgaagccaatggcaatctcatcgctcccatgtatgctttcgctctctctcgcggattcggttccggcataatcactagccaagcctccatgcacgagtgcaataccaagtgtcaaactccactgggagccattcaaagctccctgccctaccaaaacatccatcctgtgaccattggagagtgccctaaatacgtgcgcagcgcgaaactgcgcatggtgaccggtctccgcaatataccctccatacaatcgcgcggcctgtttggtgctatcgctggctttatcgagggaggatggactggaatgatcgacggctggtatggctatcatcatcaaaacgaacagggttccggctacgccgctgaccaaaagtccactcaaaacgccattaacggtattacaaacaaagtaaacaccgtgatagagaaaatgaatatccaattcactgccgtgggcaaagagtttaacaagctggagaagcgcatggaaaatctgaacaaaaaagtcgatgatggcttcctcgacatctggacttacaacgccgaactcctcgtgctgctcgaaaacgagaggactctggacttccacgactccaacgtgaagaacctgtacgagaaagtcaaatcccaactcaagaacaacgccaaagaaatcggcaacggctgcttcgagttctaccacaaatgtgataacgagtgtatggaatccgtacggcaaggcacttacgactaccccaaatacagcgaagagagcaaattgaaccgcgagaaagtggacggcgtgaaactggagtccatgggcatctatcagcaccaccaccaccaccactaatag

SEQ ID NO: 119 - DNA, 2439 bp, Artificial Sequence
  ngSTF2.HA1-1
atgaaattcttagtcaacgttgcccttgtttttatggtcgtatacatttcttacatctatgcggcccaagtgatcaacaccaactccctgtccctgctcactcaaaacaacctccagaaatctcagtctgctctcggtactgctatcgagcgtctctcctccggcctgaggatcaactccgctaaagatgacgccgccggacaagctatcgctaaccgctttactgccaacattaaaggcctgacccaagcctctaggaacgccaatgatggcatttctatcgctcaaaccaccgaaggcgccctgaacgaaatcaataataacctgcaacgtgtccgcgaactcgccgtccagtccgcccaatctaccaactctcagtctgacctggactctatccaagctgagatcacccaaaggctcaacgagatcgatcgtgtgtctggtcaaactcagtttaacggcgtcaaagtgctggctcaagacaacacactcaccatccaagtaggagccaatgacggcgagacaatcgatatcgacctgaagcagatcaattctcaaactctgggcctggactccctgaacgtccaaaaggcttacgacgtgaaggacaccgctgtgacaaccaaagcctatgctaatcaaggaacaaccctggacgtgtccggactcgatgacgccgctatcaaggccgctactggcggcactcagggaactgcctctgtgaccggaggcgctgtgaagttcgacgccgataacaacaaatacttcgtcactattggtggtttcactggcgctgacgccgctaagaacggtgactacgaggtcaacgtcgccactgacggaacagtgacactggccgctggcgctaccaagaccacaatgcctgctggtgctactactaagacagaggtgcaggaactcaaggacacccctgccgtggtgtccgccgatgctaagaacgctctcattgctggtggtgtcgacgctacggacgccaacggagccgagcttgtgaaaatgtcctacaccgacaagaacggaaagactatcgagggaggttacgctctgaaggctggcgataagtactacgccgctgattatgacgaagctacaggcgccattaaagctaaaaccacatcttataccgctgccgatggtactaccaagactgctgccaatcagctgggtggagtcgatggaaaaaccgaagtggtcacaatcgacggaaagacctatcaagcctccaaggctgctggccacgacttcaaggcccaacccgaactggccgaggctgctgctaaaaccactgaaaaccccctgcagaaaattgacgctgccctggcccaagtggatgccctccgctccgacctcggcgctgtgcaaaaccgcttcaactccgctattacaaacctcggcaataccgtcaatcagctctctgaagctaggtctcgtattgaggattccgattacgctaccgaggtctcccagatgtcccgtgcccaaattctccaacaagccggcacctccgtcctcgcccaagccaatcaggtgccacagaatgtgctgagcctgctggcttctggatctggatctggttcttcccataatggcaaattgtgtcggctgaaaggcatcgcccctctgcaactcggcaagtgcaatattgcggggtggctgttgggcaacccagaatgtgaccccctcctgcccgtccgttcttggtcttacatcgtggaaacacctaactccgagaacggcatctgttacccgggcgacttcattgactacgaggagctccgcgaacagctgtcttctgtctcttctttcgaacgtttcgaaattttcccaaaggaatcctcctggccaaaccataacaccaacggagtgaccgccgcctgtagccatgagggcaagtcttctttctaccgtaatctgctgtggctgactgaaaaagagggttcttatcccaaactgaagaactcttatgtcaacaagaagggcaaagaggtcctggtgctgtggggtatccaccacccccccaactccaaggagcagcagaatctgtaccaaaacgaaaatgcttacgtgtctgtcgtgacatctaactacaaccggcgcttcacgcccgaaatcgccgagcgtcccaaagtgcgcgatcaggccggaaggatgaactactactggaccctgctcaaacccggagataccatcatattcgaagccaatggcaatctcatcgctcccatgtatgctttcgctctctctcgcggattcggttccggcataatcactagccaagcctccatgcacgagtgcaataccaagtgtcaaactccactgggagccattcaaagctccctgccctaccaaaacatccatcctgtgaccattggagagtgccctaaatacgtgcgccaccaccaccaccaccactaatag

SEQ ID NO: 120 - DNA, 840 bp, Artificial Sequence
  ng HA1-1
tcccataatggcaaattgtgtcggctgaaaggcatcgcccctctgcaactcggcaagtgcaatattgcggggtggctgttgggcaacccagaatgtgaccccctcctgcccgtccgttcttggtcttacatcgtggaaacacctaactccgagaacggcatctgttacccgggcgacttcattgactacgaggagctccgcgaacagctgtcttctgtctcttctttcgaacgtttcgaaattttcccaaaggaatcctcctggccaaaccataacaccaacggagtgaccgccgcctgtagccatgagggcaagtcttctttctaccgtaatctgctgtggctgactgaaaaagagggttcttatcccaaactgaagaactcttatgtcaacaagaagggcaaagaggtcctggtgctgtggggtatccaccacccccccaactccaaggagcagcagaatctgtaccaaaacgaaaatgcttacgtgtctgtcgtgacatctaactacaaccggcgcttcacgcccgaaatcgccgagcgtcccaaagtgcgcgatcaggccggaaggatgaactactactggaccctgctcaaacccggagataccatcatattcgaagccaatggcaatctcatcgctcccatgtatgctttcgctctctctcgcggattcggttccggcataatcactagccaagcctccatgcacgagtgcaataccaagtgtcaaactccactgggagccattcaaagctccctgccctaccaaaacatccatcctgtgaccattggagagtgccctaaatacgtgcgccaccaccaccaccaccactaatag

SEQ ID NO: 121 - DNA, 2292 bp, Artificial Sequence
  ngSTF2.HA1-2
atgaaattcttagtcaacgttgcccttgtttttatggtcgtatacatttcttacatctatgcggcccaagtgatcaacaccaactccctgtccctgctcactcaaaacaacctccagaaatctcagtctgctctcggtactgctatcgagcgtctctcctccggcctgaggatcaactccgctaaagatgacgccgccggacaagctatcgctaaccgctttactgccaacattaaaggcctgacccaagcctctaggaacgccaatgatggcatttctatcgctcaaaccaccgaaggcgccctgaacgaaatcaataataacctgcaacgtgtccgcgaactcgccgtccagtccgcccaatctaccaactctcagtctgacctggactctatccaagctgagatcacccaaaggctcaacgagatcgatcgtgtgtctggtcaaactcagtttaacggcgtcaaagtgctggctcaagacaacacactcaccatccaagtaggagccaatgacggcgagacaatcgatatcgacctgaagcagatcaattctcaaactctgggcctggactccctgaacgtccaaaaggcttacgacgtgaaggacaccgctgtgacaaccaaagcctatgctaatcaaggaacaaccctggacgtgtccggactcgatgacgccgctatcaaggccgctactggcggcactcagggaactgcctctgtgaccggaggcgctgtgaagttcgacgccgataacaacaaatacttcgtcactattggtggtttcactggcgctgacgccgctaagaacggtgactacgaggtcaacgtcgccactgacggaacagtgacactggccgctggcgctaccaagaccacaatgcctgctggtgctactactaagacagaggtgcaggaactcaaggacacccctgccgtggtgtccgccgatgctaagaacgctctcattgctggtggtgtcgacgctacggacgccaacggagccgagcttgtgaaaatgtcctacaccgacaagaacggaaagactatcgagggaggttacgctctgaaggctggcgataagtactacgccgctgattatgacgaagctacaggcgccattaaagctaaaaccacatcttataccgctgccgatggtactaccaagactgctgccaatcagctgggtggagtcgatggaaaaaccgaagtggtcacaatcgacggaaagacctatcaagcctccaaggctgctggccacgacttcaaggcccaacccgaactggccgaggctgctgctaaaaccactgaaaaccccctgcagaaaattgacgctgccctggcccaagtggatgccctccgctccgacctcggcgctgtgcaaaaccgcttcaactccgctattacaaacctcggcaataccgtcaatcagctctctgaagctaggtctcgtattgaggattccgattacgctaccgaggtctcccagatgtcccgtgcccaaattctccaacaagccggcacctccgtcctcgcccaagccaatcaggtgccacagaatgtgctgagcctactagcatcaggttccggctcaggttccaaaggcatagcgccactgcagctcggcaaatgtaacatcgcaggttggctccttggtaacccggagtgcgaccccctcctccctgtacgatcctggagttatatcgtggagacccccaatagcgagaacggaatttgctacccaggagatttcatagactacgaggagttgcgcgagcagctttcgtctgtgagcagcttcgagaggttcgaaatcttcccgaaggagagcagctggccgaatcataacactaacggtgtgacagccgcctgcagtcatgaaggaaagagttcattctatcgcaacctgctgtggttgacggagaaagagggcagctaccctaagttgaagaactcctatgtgaacaaaaaaggcaaggaggttctggtgctgtggggcatacaccacccccccaatagcaaggagcagcagaatctgtaccaaaacgagaatgcctatgtgagcgtggtcactagtaactataaccgtcggttcactcccgagatcgccgagcgtccgaaggtgagggaccaggcaggccggatgaactactactggaccctattgaagccaggggacacgattatcttcgaggcaaacggaaacctcatagcgccgatgtacgcgttcgccctgagccgtggctttggatcggggatcatcacgtctcaccatcatcaccaccattaatag

SEQ ID NO: 122 - DNA, 693 bp, Artificial Sequence
  ng HA1-2
aaaggcatagcgccactgcagctcggcaaatgtaacatcgcaggttggctccttggtaacccggagtgcgaccccctcctccctgtacgatcctggagttatatcgtggagacccccaatagcgagaacggaatttgctacccaggagatttcatagactacgaggagttgcgcgagcagctttcgtctgtgagcagcttcgaaaggttcgagatattcccgaaggagagcagctggccgaatcataacactaacggtgtgacagccgcctgcagtcatgaaggaaagagttcattctatcgcaacctgctgtggttgacggagaaagagggcagctaccctaagttgaagaactcctatgtgaacaaaaaaggcaaggaggttctggtgctgtggggcatacaccacccccccaatagcaaggagcagcagaatctgtaccaaaacgagaatgcctatgtgagcgtggtcactagtaactataaccgtcggttcactcccgagatcgccgagcgtccgaaggtgagggaccaggcaggccggatgaactactactggaccctattgaagccaggggacacgattatcttcgaggcaaacggaaacctcatagcgccgatgtacgccttcgccctgagccgtggctttggatcggggatcatcacgtctcaccatcatcaccaccattaatag

SEQ ID NO: 123 - DNA, 2292 bp, Artificial Sequence
  ngSTF2.HA1-2mut
atgaaattcttagtcaacgttgcccttgtttttatggtcgtatacatttcttacatctatgcggcccaagtgatcaacaccaactccctgtccctgctcactcaaaacaacctccagaaatctcagtctgctctcggtactgctatcgagcgtctctcctccggcctgaggatcaactccgctaaagatgacgccgccggacaagctatcgctaaccgctttactgccaacattaaaggcctgacccaagcctctaggaacgccaatgatggcatttctatcgctcaaaccaccgaaggcgccctgaacgaaatcaataataacctgcaacgtgtccgcgaactcgccgtccagtccgcccaatctaccaactctcagtctgacctggactctatccaagctgagatcacccaaaggctcaacgagatcgatcgtgtgtctggtcaaactcagtttaacggcgtcaaagtgctggctcaagacaacacactcaccatccaagtaggagccaatgacggcgagacaatcgatatcgacctgaagcagatcaattctcaaactctgggcctggactccctgaacgtccaaaaggcttacgacgtgaaggacaccgctgtgacaaccaaagcctatgctaatcaaggaacaaccctggacgtgtccggactcgatgacgccgctatcaaggccgctactggcggcactcagggaactgcctctgtgaccggaggcgctgtgaagttcgacgccgataacaacaaatacttcgtcactattggtggtttcactggcgctgacgccgctaagaacggtgactacgaggtcaacgtcgccactgacggaacagtgacactggccgctggcgctaccaagaccacaatgcctgctggtgctactactaagacagaggtgcaggaactcaaggacacccctgccgtggtgtccgccgatgctaagaacgctctcattgctggtggtgtcgacgctacggacgccaacggagccgagcttgtgaaaatgtcctacaccgacaagaacggaaagactatcgagggaggttacgctctgaaggctggcgataagtactacgccgctgattatgacgaagctacaggcgccattaaagctaaaaccacatcttataccgctgccgatggtactaccaagactgctgccaatcagctgggtggagtcgatggaaaaaccgaagtggtcacaatcgacggaaagacctatcaagcctccaaggctgctggccacgacttcaaggcccaacccgaactggccgaggctgctgctaaaaccactgaaaaccccctgcagaaaattgacgctgccctggcccaagtggatgccctccgctccgacctcggcgctgtgcaaaaccgcttcaactccgctattacaaacctcggcaataccgtcaatcagctctctgaagctaggtctcgtattgaggattccgattacgctaccgaggtctcccagatgtcccgtgcccaaattctccaacaagccggcacctccgtcctcgcccaagccaatcaggtgccacagaatgtgctgagcctgctggcttctggatctggatctggttctaaaggcgctgcccctctgcaactcggcaagtgcaatattgcggggtggctgttgggcaacccagaatgtgaccccctcctgcccgtccgttcttggtctgacatcgctgaaacacctaactccgagaacggcatctgttacccgggcgacttcattgactacgaggagctccgcgaacagctgtcttctgtctcttctttcgaacgtttcgaaattttcccaaaggaatcctcctggccaaaccataacaccaacggagtgaccgccgcctgtagccatgagggcaagtcttctttctaccgtaatctgctgtggctgactgaaaaagagggttcttatcccaaactgaagaactcttatgtcaacaagaagggcaaagaggtcctggtgctgtggggtatccaccacccccccaactccaaggagcagcagaatctgtaccaaaacgaaaatgcttacgtgtctgtcgtgacatctaactacaaccggcgcttcacgcccgaaatcgccgagcgtcccaaagtgcgcgatcaggccggaaggatgaactactactggaccctgctcaaacccggagataccatcatattcgaagccaatggcaatctcatcgctcccatgtatgctttcgctctctctcgcggattcggttccggcataatcactagccaccaccaccaccaccactaatag

SEQ ID NO: 124 - DNA, 693 bp, Artificial Sequence
  ngHA1-2mut
aaaggcgctgcccctctgcaactcggcaagtgcaatattgcggggtggctgttgggcaacccagaatgtgaccccctcctgcccgtccgttcttggtctgacatcgctgaaacacctaactccgagaacggcatctgttacccgggcgacttcattgactacgaggagctccgcgaacagctgtcttctgtctcttctttcgaacgtttcgaaattttcccaaaggaatcctcctggccaaaccataacaccaacggagtgaccgccgcctgtagccatgagggcaagtcttctttctaccgtaatctgctgtggctgactgaaaaagagggttcttatcccaaactgaagaactcttatgtcaacaagaagggcaaagaggtcctggtgctgtggggtatccaccacccccccaactccaaggagcagcagaatctgtaccaaaacgaaaatgcttacgtgtctgtcgtgacatctaactacaaccggcgcttcacgcccgaaatcgccgagcgtcccaaagtgcgcgatcaggccggaaggatgaactactactggaccctgctcaaacccggagataccatcatattcgaagccaatggcaatctcatcgctcccatgtatgctttcgctctctctcgcggattcggttccggcataatcactagccaccaccaccaccaccactaatag

SEQ ID NO: 125 - DNA, 2151 bp, Artificial Sequence
  ngSTF2.HA1-3
atgaaattcttagtcaacgttgcccttgtttttatggtcgtatacatttcttacatctatgcggcccaagtgatcaacaccaactccctgtccctgctcactcaaaacaacctccagaaatctcagtctgctctcggtactgctatcgagcgtctctcctccggcctgaggatcaactccgctaaagatgacgccgccggacaagctatcgctaaccgctttactgccaacattaaaggcctgacccaagcctctaggaacgccaatgatggcatttctatcgctcaaaccaccgaaggcgccctgaacgaaatcaataataacctgcaacgtgtccgcgaactcgccgtccagtccgcccaatctaccaactctcagtctgacctggactctatccaagctgagatcacccaaaggctcaacgagatcgatcgtgtgtctggtcaaactcagtttaacggcgtcaaagtgctggctcaagacaacacactcaccatccaagtaggagccaatgacggcgagacaatcgatatcgacctgaagcagatcaattctcaaactctgggcctggactccctgaacgtccaaaaggcttacgacgtgaaggacaccgctgtgacaaccaaagcctatgctaatcaaggaacaaccctggacgtgtccggactcgatgacgccgctatcaaggccgctactggcggcactcagggaactgcctctgtgaccggaggcgctgtgaagttcgacgccgataacaacaaatacttcgtcactattggtggtttcactggcgctgacgccgctaagaacggtgactacgaggtcaacgtcgccactgacggaacagtgacactggccgctggcgctaccaagaccacaatgcctgctggtgctactactaagacagaggtgcaggaactcaaggacacccctgccgtggtgtccgccgatgctaagaacgctctcattgctggtggtgtcgacgctacggacgccaacggagccgagcttgtgaaaatgtcctacaccgacaagaacggaaagactatcgagggaggttacgctctgaaggctggcgataagtactacgccgctgattatgacgaagctacaggcgccattaaagctaaaaccacatcttataccgctgccgatggtactaccaagactgctgccaatcagctgggtggagtcgatggaaaaaccgaagtggtcacaatcgacggaaagacctatcaagcctccaaggctgctggccacgacttcaaggcccaacccgaactggccgaggctgctgctaaaaccactgaaaaccccctgcagaaaattgacgctgccctggcccaagtggatgccctccgctccgacctcggcgctgtgcaaaaccgcttcaactccgctattacaaacctcggcaataccgtcaatcagctctctgaagctaggtctcgtattgaggattccgattacgctaccgaggtctcccagatgtcccgtgcccaaattctccaacaagccggcacctccgtcctcgcccaagccaatcaggtgccacagaatgtgctgagcctactagcatcaggttccggctcaggttccaatagcgagaacggaatttgctacccaggagatttcatagactacgaggagttgcgcgagcagctttcgtctgtgagcagcttcgagaggttcgaaatcttcccgaaggagagcagctggccgaatcataacactaacggtgtgacagccgcctgcagtcatgaaggaaagagttcattctatcgcaacctgctgtggttgacggagaaggagggcagctaccctaagctgaagaactcctatgtgaacaaaaaaggcaaggaggttctggtgctgtggggcatacaccacccccccaatagcaaggagcagcagaatctgtaccaaaacgagaatgcctatgtgagcgtggtcactagtaactataaccgtcggttcactcccgagatcgccgagcgtccgaaggtgagggaccaggcaggccggatgaactactactggaccctattgaagccaggggacacgattatcttcgaggcaaacggaaacctcatagcgccgatgtacgccttcgccctgagccgtggccaccatcatcaccaccattaatag

SEQ ID NO: 126 - DNA, 552 bp, Artificial Sequence
  ngHA1-3
aatagcgagaacggaatttgctacccaggagatttcatagactacgaggagttgcgcgagcagctttcgtctgtgagcagcttcgaaaggttcgagatattcccgaaggagagcagctggccgaatcataacactaacggtgtgacagccgcctgcagtcatgaaggaaagagttcattctatcgcaacctgctgtggttgacggagaaagagggcagctaccctaagttgaagaactcctatgtgaacaaaaaaggcaaggaggttctggtgctgtggggcatacaccacccccccaatagcaaggagcagcagaatctgtaccaaaacgagaatgcctatgtgagcgtggtcactagtaactataaccgtcggttcactcccgagatcgccgagcgtccgaaggtgagggaccaggcaggccggatgaactactactggaccctattgaagccaggggacacgattatcttcgaggcaaacggaaacctcatagcgccgatgtacgccttcgccctgagccgtggccaccatcatcaccaccattaatag

SEQ ID NO: 127 - DNA, 2151 bp, Artificial Sequence
  ngSTF2.HA1-3mut
atgaaattcttagtcaacgttgcccttgtttttatggtcgtatacatttcttacatctatgcggcccaagtgatcaacaccaactccctgtccctgctcactcaaaacaacctccagaaatctcagtctgctctcggtactgctatcgagcgtctctcctccggcctgaggatcaactccgctaaagatgacgccgccggacaagctatcgctaaccgctttactgccaacattaaaggcctgacccaagcctctaggaacgccaatgatggcatttctatcgctcaaaccaccgaaggcgccctgaacgaaatcaataataacctgcaacgtgtccgcgaactcgccgtccagtccgcccaatctaccaactctcagtctgacctggactctatccaagctgagatcacccaaaggctcaacgagatcgatcgtgtgtctggtcaaactcagtttaacggcgtcaaagtgctggctcaagacaacacactcaccatccaagtaggagccaatgacggcgagacaatcgatatcgacctgaagcagatcaattctcaaactctgggcctggactccctgaacgtccaaaaggcttacgacgtgaaggacaccgctgtgacaaccaaagcctatgctaatcaaggaacaaccctggacgtgtccggactcgatgacgccgctatcaaggccgctactggcggcactcagggaactgcctctgtgaccggaggcgctgtgaagttcgacgccgataacaacaaatacttcgtcactattggtggtttcactggcgctgacgccgctaagaacggtgactacgaggtcaacgtcgccactgacggaacagtgacactggccgctggcgctaccaagaccacaatgcctgctggtgctactactaagacagaggtgcaggaactcaaggacacccctgccgtggtgtccgccgatgctaagaacgctctcattgctggtggtgtcgacgctacggacgccaacggagccgagcttgtgaaaatgtcctacaccgacaagaacggaaagactatcgagggaggttacgctctgaaggctggcgataagtactacgccgctgattatgacgaagctacaggcgccattaaagctaaaaccacatcttataccgctgccgatggtactaccaagactgctgccaatcagctgggtggagtcgatggaaaaaccgaagtggtcacaatcgacggaaagacctatcaagcctccaaggctgctggccacgacttcaaggcccaacccgaactggccgaggctgctgctaaaaccactgaaaaccccctgcagaaaattgacgctgccctggcccaagtggatgccctccgctccgacctcggcgctgtgcaaaaccgcttcaactccgctattacaaacctcggcaataccgtcaatcagctctctgaagctaggtctcgtattgaggattccgattacgctaccgaggtctcccagatgtcccgtgcccaaattctccaacaagccggcacctccgtcctcgcccaagccaatcaggtgccacagaatgtgctgagcctgctggcttctggatctggatctggttctaactccgagaacgaaatctgttacccgggcgacttcattgacaaagaggagctccgcgaacagctgtcttctgtctcttctttcgaacgtttcgaaattttcccaaaggaatcctcctggccaaaccataacaccaacggagtgaccgccgcctgtagccatgagggcaagtcttctttctaccgtaatctgctgtggctgactgaaaaagagggttcttatcccaaactgaagaactcttatgtcaacaagaagggcaaagaggtcctggtgctgtggggtatccaccacccccccaactccaaggagcagcagaatctgtaccaaaacgaaaatgcttacgtgtctgtcgtgacatctaactacaaccggcgcttcacgcccgaaatcgccgagcgtcccaaagtgcgcgatcaggccggaaggatgaactactactggaccctgctcaaacccggagataccatcatattcgaagccaatggcaatctcatcgctcccatgtatgctgctgctctctctcgcggacaccaccaccaccaccactaatag

SEQ ID NO: 128 - DNA, 552 bp, Artificial Sequence; identical to SEQ ID NO: 116
  ngHA1-3mut

SEQ ID NO: 129 - DNA, 2439 bp, Artificial Sequence
  wtSTF2.HA1-1ng
atgaaattcttagtcaacgttgcccttgtttttatggtcgtatacatttcttacatctatgcggcccaggttatcaataccaactccctgtcgttgctcacccaaaataaccttaataaaagccagagcgcactgggaaccgccatagaacgcctctcaagcggcctccggatcaattctgcaaaagacgacgccgccggtcaggccatcgcaaaccgctttaccgccaatatcaagggactgacgcaggcttcgaggaatgctaacgatggaataagcatcgctcaaaccacggagggcgccctgaacgagatcaacaacaacctacagcgcgtcagggagctcgcagtgcagtccgccaattcgaccaactcgcagtcggacctggactcgatccaagccgaaatcacccagcgcctgaatgagattgaccgggtgagcggtcagacacagtttaacggcgtgaaggtacttgcacaggataacacacttacgatacaggtgggcgccaacgatggtgaaaccatagacattgatctcaaacagattaacagccagacgctcgggttggatagcctgaatgtgcaaaaggcgtacgacgtgaaagacacggcggtcactaccaaagcctacgctaacaatggcactaccttggatgtgagcggattggatgatgcagcaatcaaggctgctaccggcggtacgaacggaaccgcgtccgtgaccggcggtgccgtgaagttcgatgctgacaacaataagtatttcgtcaccattggaggctttactggcgccgacgcagcaaagaacggcgactatgaagtgaacgtggcaaccgatggaaccgtgacgctggccgctggtgccaccaagaccaccatgccagccggcgccacaactaagaccgaggtgcaggagttaaaggacacccccgcggtggttagcgcagatgccaaaaacgccttgatcgccggcggagtggatgcaactgatgctaatggtgcggagctggttaaaatgtcgtatacagacaagaatggtaagacgatcgagggcggttatgcccttaaggcaggagataagtattacgctgctgattacgatgaggcgacgggagctattaaggccaagacaacgtcatacacggcggcggacggaacgactaagacggctgccaatcagttgggaggggttgacgggaagacagaggtcgttacgatcgatggcaagacatacaacgcttccaaggccgctggccacgatttcaaagctcaacccgaactggccgaggccgcggcgaaaacaactgagaacccgttgcagaagattgatgcggccctggcgcaagtagatgccctgcgctcagacctgggcgccgttcaaaatcgattcaattccgcgattacaaacctgggcaatacagtaaacaatctatccgaggccagatcccgcattgaagactccgactacgcgacagaagtaagtaacatgagtcgtgcccagattctgcagcaggccggcactagtgtcctggcccaggccaatcaagtcccgcagaatgtgctgagcctactagcatctggatctggatctggttcttcccataatggcaaattgtgtcggctgaaaggcatcgcccctctgcaactcggcaagtgcaatattgcggggtggctgttgggcaacccagaatgtgaccccctcctgcccgtccgttcttggtcttacatcgtggaaacacctaactccgagaacggcatctgttacccgggcgacttcattgactacgaggagctccgcgaacagctgtcttctgtctcttctttcgaacgtttcgaaattttcccaaaggaatcctcctggccaaaccataacaccaacggagtgaccgccgcctgtagccatgagggcaagtcttctttctaccgtaatctgctgtggctgactgaaaaagagggttcttatcccaaactgaagaactcttatgtcaacaagaagggcaaagaggtcctggtgctgtggggtatccaccacccccccaactccaaggagcagcagaatctgtaccaaaacgaaaatgcttacgtgtctgtcgtgacatctaactacaaccggcgcttcacgcccgaaatcgccgagcgtcccaaagtgcgcgatcaggccggaaggatgaactactactggaccctgctcaaacccggagataccatcatattcgaagccaatggcaatctcatcgctcccatgtatgctttcgctctctctcgcggattcggttccggcataatcactagccaagcctccatgcacgagtgcaataccaagtgtcaaactccactgggagccattcaaagctccctgccctaccaaaacatccatcctgtgaccattggagagtgccctaaatacgtgcgccaccaccaccaccaccactaatag

SEQ ID NO: 130 - DNA, 840 bp, Artificial Sequence; identical to SEQ ID NO: 120
  ngHA1-1

SEQ ID NO: 131 - DNA, 2439 bp, Artificial Sequence
  ngSTF2.HA1-1wt
atgaaattcttagtcaacgttgcccttgtttttatggtcgtatacatttcttacatctatgcggcccaagtgatcaacaccaactccctgtccctgctcactcaaaacaacctccagaaatctcagtctgctctcggtactgctatcgagcgtctctcctccggcctgaggatcaactccgctaaagatgacgccgccggacaagctatcgctaaccgctttactgccaacattaaaggcctgacccaagcctctaggaacgccaatgatggcatttctatcgctcaaaccaccgaaggcgccctgaacgaaatcaataataacctgcaacgtgtccgcgaactcgccgtccagtccgcccaatctaccaactctcagtctgacctggactctatccaagctgagatcacccaaaggctcaacgagatcgatcgtgtgtctggtcaaactcagtttaacggcgtcaaagtgctggctcaagacaacacactcaccatccaagtaggagccaatgacggcgagacaatcgatatcgacctgaagcagatcaattctcaaactctgggcctggactccctgaacgtccaaaaggcttacgacgtgaaggacaccgctgtgacaaccaaagcctatgctaatcaaggaacaaccctggacgtgtccggactcgatgacgccgctatcaaggccgctactggcggcactcagggaactgcctctgtgaccggaggcgctgtgaagttcgacgccgataacaacaaatacttcgtcactattggtggtttcactggcgctgacgccgctaagaacggtgactacgaggtcaacgtcgccactgacggaacagtgacactggccgctggcgctaccaagaccacaatgcctgctggtgctactactaagacagaggtgcaggaactcaaggacacccctgccgtggtgtccgccgatgctaagaacgctctcattgctggtggtgtcgacgctacggacgccaacggagccgagcttgtgaaaatgtcctacaccgacaagaacggaaagactatcgagggaggttacgctctgaaggctggcgataagtactacgccgctgattatgacgaagctacaggcgccattaaagctaaaaccacatcttataccgctgccgatggtactaccaagactgctgccaatcagctgggtggagtcgatggaaaaaccgaagtggtcacaatcgacggaaagacctatcaagcctccaaggctgctggccacgacttcaaggcccaacccgaactggccgaggctgctgctaaaaccactgaaaaccccctgcagaaaattgacgctgccctggcccaagtggatgccctccgctccgacctcggcgctgtgcaaaaccgcttcaactccgctattacaaacctcggcaataccgtcaatcagctctctgaagctaggtctcgtattgaggattccgattacgctaccgaggtctcccagatgtcccgtgcccaaattctccaacaagccggcacctccgtcctcgcccaagccaatcaggtgccacagaatgtgctgagcctactagcatcaggttccggctcaggttccagccacaacggaaagctgtgccgtctgaaaggcatagcgccactgcagctcggcaaatgtaacatcgcaggttggctccttggtaacccggagtgcgaccccctcctccctgtacgatcctggagttatatcgtggagacccccaatagcgagaacggaatttgctacccaggagatttcatagactacgaggagttgcgcgagcagctttcgtctgtgagcagcttcgagaggttcgaaatcttcccgaaggagagcagctggccgaatcataacactaacggtgtgacagccgcctgcagtcatgaaggaaagagttcattctatcgcaacctgctgtggttgacggagaaagagggcagctaccctaagttgaagaactcctatgtgaacaaaaaaggcaaggaggttctggtgctgtggggcatacaccacccccccaatagcaaggagcagcagaatctgtaccaaaacgagaatgcctatgtgagcgtggtcactagtaactataaccgtcggttcactcccgagatcgccgagcgtccgaaggtgagggaccaggcaggccggatgaactactactggaccctattgaagccaggggacacgattatcttcgaggcaaacggaaacctcatagcgccgatgtacgcgttcgccctgagccgcggctttggatcggggatcatcacgtctaacgcctcgatgcacgaatgtaataccaaatgccagaccccactgggtgctatcaactcgtccttaccctatcaaaatatacatccggtcaccataggcgagtgtcccaaatatgtcagacaccatcatcaccaccattaatag

SEQ ID NO: 132 - DNA, 840 bp, Artificial Sequence
  HA1-1 PR8
agccacaacggaaagctgtgccgtctgaaaggcatagcgccactgcagctcggcaaatgtaacatcgcaggttggctccttggtaacccggagtgcgaccccctcctccctgtacgatcctggagttatatcgtggagacccccaatagcgagaacggaatttgctacccaggagatttcatagactacgaggagttgcgcgagcagctttcgtctgtgagcagcttcgaaaggttcgagatattcccgaaggagagcagctggccgaatcataacactaacggtgtgacagccgcctgcagtcatgaaggaaagagttcattctatcgcaacctgctgtggttgacggagaaagagggcagctaccctaagttgaagaactcctatgtgaacaaaaaaggcaaggaggttctggtgctgtggggcatacaccacccccccaatagcaaggagcagcagaatctgtaccaaaacgagaatgcctatgtgagcgtggtcactagtaactataaccgtcggttcactcccgagatcgccgagcgtccgaaggtgagggaccaggcaggccggatgaactactactggaccctattgaagccaggggacacgattatcttcgaggcaaacggaaacctcatagcgccgatgtacgccttcgccctgagccgtggctttggatcggggatcatcacgtctaacgcctcgatgcacgaatgtaataccaaatgccagaccccactgggtgctatcaactcgtccttaccctatcaaaatatacatccggtcaccataggcgagtgtcccaaatatgtcagacaccatcatcaccaccattaatag

SEQ ID NO: 133 - DNA, 903 bp, Artificial Sequence
  HA1-1 PR8
atgaaattcttagtcaacgttgcccttgtttttatggtcgtatacatttcttacatctatgcgagccacaacggaaagctgtgccgtctgaaaggcatagcgccactgcagctcggcaaatgtaacatcgcaggttggctccttggtaacccggagtgcgaccccctcctccctgtacgatcctggagttatatcgtggagacccccaatagcgagaacggaatttgctacccaggagatttcatagactacgaggagttgcgcgagcagctttcgtctgtgagcagcttcgaaaggttcgagatattcccgaaggagagcagctggccgaatcataacactaacggtgtgacagccgcctgcagtcatgaaggaaagagttcattctatcgcaacctgctgtggttgacggagaaagagggcagctaccctaagttgaagaactcctatgtgaacaaaaaaggcaaggaggttctggtgctgtggggcatacaccacccccccaatagcaaggagcagcagaatctgtaccaaaacgagaatgcctatgtgagcgtggtcactagtaactataaccgtcggttcactcccgagatcgccgagcgtccgaaggtgagggaccaggcaggccggatgaactactactggaccctattgaagccaggggacacgattatcttcgaggcaaacggaaacctcatagcgccgatgtacgccttcgccctgagccgtggctttggatcggggatcatcacgtctaacgcctcgatgcacgaatgtaataccaaatgccagaccccactgggtgctatcaactcgtccttaccctatcaaaatatacatccggtcaccataggcgagtgtcccaaatatgtcagacaccatcatcaccaccattaatag

SEQ ID NO: 134 - DNA, 105 bp, Artificial Sequence
  FOR PRIMER
aggcagatctatgaaattcttagtcaacgttgcccttgtttttatggtcgtatacatttcttacatctatgcgagccacaacggaaagctgtgccgtctgaaagg

SEQ ID NO: 135 - DNA, 55 bp, Artificial Sequence
  REV PRIMER
acctgcatgcctattaatggtggtgatgatggtgtctgacatatttgggacactc

SEQ ID NO: 136 - DNA, 1620 bp, Artificial Sequence
  HA0s PR8
atgaaattcttagtcaacgttgcccttgtttttatggtcgtatacatttcttacatctatgcggacaccatttgcattggataccatgcaaacaactcaaccgatactgttgataccgtccttgagaagaacgttaccgtcacgcactcggtcaacctattagaggatagccacaacggaaagctgtgccgtctgaaaggcatagcgccactgcagctcggcaaatgtaacatcgcaggttggctccttggtaacccggagtgcgaccccctcctccctgtacgatcctggagttatatcgtggagacccccaatagcgagaacggaatttgctacccaggagatttcatagactacgaggagttgcgcgagcagctttcgtctgtgagcagcttcgaaaggttcgagatattcccgaaggagagcagctggccgaatcataacactaacggtgtgacagccgcctgcagtcatgaaggaaagagttcattctatcgcaacctgctgtggttgacggagaaagagggcagctaccctaagttgaagaactcctatgtgaacaaaaaaggcaaggaggttctggtgctgtggggcatacaccacccccccaatagcaaggagcagcagaatctgtaccaaaacgagaatgcctatgtgagcgtggtcactagtaactataaccgtcggttcactcccgagatcgccgagcgtccgaaggtgagggaccaggcaggccggatgaactactactggaccctattgaagccaggggacacgattatcttcgaggcaaacggaaacctcatagcgccgatgtacgccttcgccctgagccgtggctttggatcggggatcatcacgtctaacgcctcgatgcacgaatgtaataccaaatgccagaccccactgggtgctatcaactcgtccttaccctatcaaaatatacatccggtcaccataggcgagtgtcccaaatatgtcagatccgccaagttgcggatggtgaccggcctccgcaatattcctagtattcagtcacgcggcttgttcggcgccatcgctggtttcatcgaaggcgggtggacaggcatgattgatggctggtatggctatcaccaccagaacgagcagggctcgggctacgcggctgaccagaagtcgactcagaatgccatcaatggcatcacgaataaggtgaacacggtcattgaaaagatgaacattcaatttacagccgtaggaaaagagtttaataaactggaaaaaagaatggagaatctgaataagaaggtggacgacggatttttggacatctggacgtacaacgccgagctgctggttctgctggaaaatgagcgaacactggattttcatgattctaacgtaaagaatctgtacgagaaggtgaagtcccaactaaagaataatgccaaggaaatcggaaatggatgctttgagttttaccacaagtgcgataatgagtgcatggaatccgtgcgaaatggtacatacgattacccaaagtactccgaagaatccaagctaaatcgcgaaaaggttgatggtgttaaacttgaatccatgggtatttaccaacaccatcatcaccaccattaatag

SEQ ID NO: 137 - DNA, 885 bp, Artificial Sequence
  HA1-1 PR8 (no his tag)
atgaaattcttagtcaacgttgcccttgtttttatggtcgtatacatttcttacatctatgcgagccacaacggaaagctgtgccgtctgaaaggcatagcgccactgcagctcggcaaatgtaacatcgcaggttggctccttggtaacccggagtgcgaccccctcctccctgtacgatcctggagttatatcgtggagacccccaatagcgagaacggaatttgctacccaggagatttcatagactacgaggagttgcgcgagcagctttcgtctgtgagcagcttcgaaaggttcgagatattcccgaaggagagcagctggccgaatcataacactaacggtgtgacagccgcctgcagtcatgaaggaaagagttcattctatcgcaacctgctgtggttgacggagaaagagggcagctaccctaagttgaagaactcctatgtgaacaaaaaaggcaaggaggttctggtgctgtggggcatacaccacccccccaatagcaaggagcagcagaatctgtaccaaaacgagaatgcctatgtgagcgtggtcactagtaactataaccgtcggttcactcccgagatcgccgagcgtccgaaggtgagggaccaggcaggccggatgaactactactggaccctattgaagccaggggacacgattatcttcgaggcaaacggaaacctcatagcgccgatgtacgccttcgccctgagccgtggctttggatcggggatcatcacgtctaacgcctcgatgcacgaatgtaataccaaatgccagaccccactgggtgctatcaactcgtccttaccctatcaaaatatacatccggtcaccataggcgagtgtcccaaatatgtcagataatag

SEQ ID NO: 138 - DNA, 45 bp, Artificial Sequence
  REV PRIMER
acctgcatgcctattatctgacatatttgggacactcgcctatgg

SEQ ID NO: 139 - DNA, 903 bp, Artificial Sequence
  HA1-1 NC
atgaaattcttagtcaacgttgcccttgtttttatggtcgtatacatttcttacatctatgcgagccacaatggtaagctgtgtctgttgaagggaattgcacccctccaactgggcaactgttcggtcgctggttggatcctcggaaacccagaatgcgagctccttatcagtaaggaatcttggtcttatattgtcgaaaccccgaaccccgagaacggaacatgctacccgggttactttgctgattacgaagagcttcgcgagcaactcagctccgtatcctccttcgagcgcttcgagatttttcccaaagagtccagctggccaaatcataccgtcaccggcgtgtcggcctcctgttcccacaacggaaagtctagcttctatagaaatcttctctggctgacgggtaagaatggtctttaccccaatttgagcaagtcctacgtcaacaacaaagaaaaggaagttctggtattgtggggtgtgcaccaccctccgaacatcggcaatcagcgcgccctgtatcacacagagaacgcgtatgtttccgttgtctcctcacattactcgaggcgcttcactcctgaaatagctaagcgtccgaaagtgcgtgaccaggagggacgtatcaactattattggacgctgttggagccaggcgatacaattatcttcgaggctaacggtaaccttatcgctccctggtacgccttcgccctgtcgcgtggtttcggtagtggaataatcactagtaatgctcctatggacgagtgtgacgctaagtgccaaacacctcagggcgctatcaatagctcccttccattccagaacgtccatccggttaccattggagagtgtccaaagtacgtgagacaccatcatcaccatcactaatag

SEQ ID NO: 140 - DNA, 103 bp, Artificial Sequence
  FOR PRIMER
aggcagatctatgaaattcttagtcaacgttgcccttgtttttatggtcgtatacatttcttacatctatgcgagccacaatggtaagctgtgtctgttgaag

SEQ ID NO: 141 - DNA, 63 bp, Artificial Sequence
  REV PRIMER
agtcgcatgcctattaatggtggtgatgatggtgtctcacgtactttggacactctccaatgg

SEQ ID NO: 142 - DNA, 1632 bp, Artificial Sequence
  HA0s NC
agatctatgaagtttctcgtgaacgttgcactggtgtttatggtagtctatatatcgtacatttatgctgacacgatttgcatcggttaccatgcgaacaactccacggataccgtggacacagtgttggaaaagaacgtgaccgtcacgcactccgtaaaccttctggaggacagccacaatggtaagctgtgtctgttgaagggaattgcacccctccaactgggcaactgttcggtcgctggttggatcctcggaaacccagaatgcgagctccttatcagtaaggaatcttggtcttatattgtcgaaaccccgaaccccgagaacggaacatgctacccgggttactttgctgattacgaagagcttcgcgagcaactcagctccgtatcctccttcgagcgcttcgagatttttcccaaagagtccagctggccaaatcataccgtcaccggcgtgtcggcctcctgttcccacaacggaaagtctagcttctatagaaatcttctctggctgacgggtaagaatggtctttaccccaatttgagcaagtcctacgtcaacaacaaagaaaaggaagttctggtattgtggggtgtgcaccaccctccgaacatcggcaatcagcgcgccctgtatcacacagagaacgcgtatgtttccgttgtctcctcacattactcgaggcgcttcactcctgaaatagctaagcgtccgaaagtgcgtgaccaggagggacgtatcaactattattggacgctgttggagccaggcgatacaattatcttcgaggctaacggtaaccttatcgctccctggtacgccttcgccctgtcgcgtggtttcggtagtggaataatcactagtaatgctcctatggacgagtgtgacgctaagtgccaaacacctcagggcgctatcaatagctcccttccattccagaacgtccatccggttaccattggagagtgtccaaagtacgtgagatcggccaaacttcgcatggtcacgggtctgcgcaacatcccgtcaatccaatctaggggcctcttcggcgctatcgccggtttcattgagggcggttggactggaatggttgacggatggtacggctatcatcaccagaacgaacaaggttccggttacgctgctgaccagaaatctactcagaacgcgatcaatggtatcacgaacaaggtgaacagcgtcattgaaaagatgaatactcagtttacagccgtgggcaaagagttcaataaactcgagagacgtatggaaaacctcaataagaaggtggatgacggcttcctggacatttggacttacaacgccgagctgctggtcctgctcgagaacgagagaacccttgacttccacgacagcaacgtcaagaacctgtacgagaaggtgaaaagtcaacttaaaaacaatgccaaggagattggtaacggctgcttcgaattctaccacaagtgtaataatgagtgcatggaatccgttaagaacggcacctacgattaccctaaatactcagaggagtccaagcttaaccgcgagaagatcgacggcgtaaaactggaaagcatgggcgtataccaacaccatcatcaccatcactaataggcatgc

SEQ ID NO: 143 - DNA, 909 bp, Artificial Sequence
  HA1-1 VN
atgaaattcttagtcaacgttgcccttgtttttatggtcgtatacatttcttacatctatgcggagaagaaacacaacggtaagctttgcgacttggatggagtcaagcccctcatacttagagattgtagtgtagccggttggctgctcggtaacccaatgtgcgatgagttcatcaatgttcccgaatggtcatatatcgtcgaaaaagctaatcctgtcaacgacctgtgctaccccggtgatttcaatgactatgaagaactgaagcacctgctctcccgcatcaaccatttcgagaaaatccagatcattcccaagagttcctggtctagccatgaggctagtctgggtgtctcatccgcctgcccatatcagggtaaaagttctttctttaggaacgtagtatggttgataaagaaaaactctacatacccgaccatcaagcgctcttacaacaatacgaaccaagaggatctgcttgtcctttggggaatccatcatcctaatgatgctgccgaacagactaagctctaccaaaaccctaccacttatatttccgtcggcacctctactctgaaccagcgccttgtgcccaggatcgctacgagatcaaaagtcaacggccaatcgggccgcatggaattcttctggacgatcctgaagcctaatgacgctatcaacttcgagtcaaatggaaactttatcgctcccgagtacgcttacaagatcgtcaagaagggcgactccacgattatgaagtcagagttggagtacggcaactgcaacacaaagtgccaaactcctatgggcgctataaattcttcaatgccgttccacaacatccatccgctcacgatcggtgagtgcccgaaatatgtaaagcaccatcaccaccatcactaatag

SEQ ID NO: 144 - DNA, 99 bp, Artificial Sequence
  FOR PRIMER
aggcagatctatgaaattcttagtcaacgttgcccttgtttttatggtcgtatacatttcttacatctatgcggagaagaaacacaacggtaagctttg

SEQ ID NO: 145 - DNA, 58 bp, Artificial Sequence
  REV PRIMER
agtcgcatgcctattatggtggtgatgatggtgctttacatatttcgggcactcaccg

SEQ ID NO: 146 - DNA, 1644 bp, Artificial Sequence
  HA0s VN
agatctatgaaattcttggttaatgtagccctggtgtttatggtagtgtacatttcatacatttatgctgatcaaatctgcattggctaccatgccaacaacagcaccgagcaagttgacacgatcatggagaagaacgtaaccgtcactcacgctcaagacatcctggagaagaaacacaacggtaagctttgcgacttggatggagtcaagcccctcatacttagagattgtagtgtagccggttggctgctcggtaacccaatgtgcgatgagttcatcaatgttcccgaatggtcatatatcgtcgaaaaagctaatcctgtcaacgacctgtgctaccccggtgatttcaatgactatgaagaactgaagcacctgctctcccgcatcaaccatttcgagaaaatccagatcattcccaagagttcctggtctagccatgaggctagtctgggtgtctcatccgcctgcccatatcagggtaaaagttctttctttaggaacgtagtatggttgataaagaaaaactctacatacccgaccatcaagcgctcttacaacaatacgaaccaagaggatctgcttgtcctttggggaatccatcatcctaatgatgctgccgaacagactaagctctaccaaaaccctaccacttatatttccgtcggcacctctactctgaaccagcgccttgtgcccaggatcgctacgagatcaaaagtcaacggccaatcgggccgcatggaattcttctggacgatcctgaagcctaatgacgctatcaacttcgagtcaaatggaaactttatcgctcccgagtacgcttacaagatcgtcaagaagggcgactccacgattatgaagtcagagttggagtacggcaactgcaacacaaagtgccaaactcctatgggcgctataaattcttcaatgccgttccacaacatccatccgctcacgatcggtgagtgcccgaaatatgtaaagtcgaatcgtctcgtactggcgacaggcctgagaaatagtccgcaacgtgaacgtcgtcgcaagaagagaggactgtttggtgccattgcaggctttattgagggcggctggcagggcatggttgacggatggtacggctaccaccattcaaacgagcagggatctggctacgccgctgacaaagaaagcacccaaaaggccattgatggagtgacgaataaggtgaattcgatcatcgacaaaatgaacacgcaattcgaagcagtgggtcgcgaattcaataacctggagcgccgtatcgagaatctgaacaagaagatggaagacggctttttggatgtctggacatataacgctgaattgctggtcctcatggaaaacgagcgtacccttgatttccacgacagcaacgttaagaacctctacgacaaggtcaggctccagctcagggataacgccaaggaattgggaaacggatgcttcgagttctaccacaaatgcgacaacgagtgcatggagtcagtcaggaatggtacctacgactacccgcaatattctgaggaggctcgcttgaagcgtgaggaaatatcgggtgttaaattggagagtattggaatctaccagcaccatcaccaccatcactaataggcatgc

SEQ ID NO: 147 - DNA, 909 bp, Artificial Sequence
  HA1-1 IND
atgaaattcttagtcaacgttgcccttgtttttatggtcgtatacatttcttacatctatgcggagaaaacccataacggtaagttgtgcgaccttgacggtgtaaagcccctgatcctccgtgactgcagtgttgctggttggcttttgggcaaccccatgtgtgacgaatttatcaacgtgcctgaatggtcatacattgtagagaaggccaaccccacgaacgatctctgttatcccggcagcttcaatgactatgaggaacttaagcaccttctgtcacgtatcaaccacttcgaaaagatccagatcatcccgaagagctcctggagcgaccacgaagccagttcgggtgtgtcttccgcttgcccctacctcggtagcccttccttcttccgtaacgtagtgtggctgatcaagaagaatagcacttaccctacaatcaaaaagtcgtataacaatactaaccaagaggatctgcttgtactctggggaattcatcatcccaacgacgcggcggagcagaccaggttgtaccagaaccccaccacttacatctccatcggtacgtccacactgaatcagcgtctggtccccaagatcgcaaccaggtccaaggttaacggtcagtccggtcgtatggagttcttctggaccatcctgaagcccaacgacgccatcaacttcgagtccaacggtaatttcattgctccggagtacgcctacaagatagttaagaagggtgattcagcgatcatgaagtcggaacttgagtatggcaactgcaacactaaatgccaaactccaatgggcgctatcaactccagtatgccattccataacatccacccattgacaatcggtgaatgtcccaagtacgtgaagcaccaccatcaccatcactaatag

SEQ ID NO: 148 - DNA, 99 bp, Artificial Sequence
  FOR PRIMER
aggcagatctatgaaattcttagtcaacgttgcccttgtttttatggtcgtatacatttcttacatctatgcggagaaaacccataacggtaagttgtg

SEQ ID NO: 149 - DNA, 63 bp, Artificial Sequence
  REV PRIMER
agtcgcatgcctattaatggtggtgatgatggtgcttcacgtacttgggacattcaccgattg

SEQ ID NO: 150 - DNA, 1644 bp, Artificial Sequence
  HA0s IND
agatctatgaagttcctggtcaatgtagccttggtatttatggtagtctatatctcgtacatttacgcagaccagatttgtattggatatcacgctaacaacagcacagagcaggtagatactattatggagaaaaatgttaccgtcactcacgcccaggacatcctggagaaaacccataacggtaagttgtgcgaccttgacggtgtaaagcccctgatcctccgtgactgcagtgttgctggttggcttttgggcaaccccatgtgtgacgaatttatcaacgtgcctgaatggtcatacattgtagagaaggccaaccccacgaacgatctctgttatcccggcagcttcaatgactatgaggaacttaagcaccttctgtcacgtatcaaccacttcgaaaagatccagatcatcccgaagagctcctggagcgaccacgaagccagttcgggtgtgtcttccgcttgcccctacctcggtagcccttccttcttccgtaacgtagtgtggctgatcaagaagaatagcacttaccctacaatcaaaaagtcgtataacaatactaaccaagaggatctgcttgtactctggggaattcatcatcccaacgacgcggcggagcagaccaggttgtaccagaaccccaccacttacatctccatcggtacgtccacactgaatcagcgtctggtccccaagatcgcaaccaggtccaaggttaacggtcagtccggtcgtatggagttcttctggaccatcctgaagcccaacgacgccatcaacttcgagtccaacggtaatttcattgctccggagtacgcctacaagatagttaagaagggtgattcagcgatcatgaagtcggaacttgagtatggcaactgcaacactaaatgccaaactccaatgggcgctatcaactccagtatgccattccataacatccacccattgacaatcggtgaatgtcccaagtacgtgaagagcaacaggttggtattggccaccggtttgagaaacagcccccagagagagtcgcgtcgtaaaaagcgcggcttgttcggagccatcgctggcttcatagagggtggttggcagggaatggtcgatggttggtatggttatcatcattccaacgagcagggaagtggttacgccgccgacaaagaatcgacccagaaggctattgacggcgtcacaaacaaagtaaactctatcattgataagatgaacacccagttcgaggctgtaggtagagaattcaacaacctcgaaagacgtattgagaacctgaacaagaaaatggaggatggcttcctggacgtgtggacctacaatgctgagctgttggtccttatggagaacgagcgtaccctcgatttccatgactcaaacgtgaagaacctgtatgacaaggtgcgtttgcaactgagggacaacgcaaaggagcttggaaacggttgtttcgaattttatcataagtgcgacaatgagtgtatggagtcgattagaaatggcacgtacaactaccctcaatacagcgaagaagctcgtctcaaacgtgaggaaatcagcggcgtcaagctcgaatcaatcggtacctatcagcaccaccatcaccatcactaataggcatgc

SEQ ID NO: 151 - protein, 811 aa, Artificial Sequence
  STF2.HA1-1His (PR8)
MKFLVNVALVFMVVYISYIYAAQVINTNSLSLLTQNNLNKSQSALGTAIERLSSGLRINSAKDDAAGQAIANRFTANIKGLTQASRNANDGISIAQTTEGALNEINNNLQRVRELAVQSANSTNSQSDLDSIQAEITQRLNEIDRVSGQTQFNGVKVLAQDNTLTIQVGANDGETIDIDLKQINSQTLGLDSLNVQKAYDVKDTAVTTKAYANNGTTLDVSGLDDAAIKAATGGTNGTASVTGGAVKFDADNNKYFVTIGGFTGADAAKNGDYEVNVATDGTVTLAAGATKTTMPAGATTKTEVQELKDTPAVVSADAKNALIAGGVDATDANGAELVKMSYTDKNGKTIEGGYALKAGDKYYAADYDEATGAIKAKTTSYTAADGTTKTAANQLGGVDGKTEVVTIDGKTYNASKAAGHDFKAQPELAEAAAKTTENPLQKIDAALAQVDALRSDLGAVQNRFNSAITNLGNTVNNLSEARSRIEDSDYATEVSNMSRAQILQQAGTSVLAQANQVPQNVLSLLASGSGSGSSHNGKLCRLKGIAPLQLGKCNIAGWLLGNPECDPLLPVRSWSYIVETPNSENGICYPGDFIDYEELREQLSSVSSFERFEIFPKESSWPNHNTNGVTAACSHEGKSSFYRNLLWLTEKEGSYPKLKNSYVNKKGKEVLVLWGIHHPPNSKEQQNLYQNENAYVSVVTSNYNRRFTPEIAERPKVRDQAGRMNYYWTLLKPGDTIIFEANGNLIAPMYAFALSRGFGSGIITSNASMHECNTKCQTPLGAINSSLPYQNIHPVTIGECPKYVRHHHHHH

SEQ ID NO: 152 - protein, 811 aa, Artificial Sequence
  ngSTF2.HA1-1His (PR8)
MKFLVNVALVFMVVYISYIYAAQVINTNSLSLLTQNNLQKSQSALGTAIERLSSGLRINSAKDDAAGQAIANRFTANIKGLTQASRNANDGISIAQTTEGALNEINNNLQRVRELAVQSAQSTNSQSDLDSIQAEITQRLNEIDRVSGQTQFNGVKVLAQDNTLTIQVGANDGETIDIDLKQINSQTLGLDSLNVQKAYDVKDTAVTTKAYANQGTTLDVSGLDDAAIKAATGGTQGTASVTGGAVKFDADNNKYFVTIGGFTGADAAKNGDYEVNVATDGTVTLAAGATKTTMPAGATTKTEVQELKDTPAVVSADAKNALIAGGVDATDANGAELVKMSYTDKNGKTIEGGYALKAGDKYYAADYDEATGAIKAKTTSYTAADGTTKTAANQLGGVDGKTEVVTIDGKTYQASKAAGHDFKAQPELAEAAAKTTENPLQKIDAALAQVDALRSDLGAVQNRFNSAITNLGNTVNQLSEARSRIEDSDYATEVSQMSRAQILQQAGTSVLAQANQVPQNVLSLLASGSGSGSSHNGKLCRLKGIAPLQLGKCNIAGWLLGNPECDPLLPVRSWSYIVETPNSENGICYPGDFIDYEELREQLSSVSSFERFEIFPKESSWPNHNTNGVTAACSHEGKSSFYRNLLWLTEKEGSYPKLKNSYVNKKGKEVLVLWGIHHPPNSKEQQNLYQNENAYVSVVTSNYNRRFTPEIAERPKVRDQAGRMNYYWTLLKPGDTIIFEANGNLIAPMYAFALSRGFGSGIITSQASMHECNTKCQTPLGAIQSSLPYQNIHPVTIGECPKYVRHHHHHH

SEQ ID NO: 153 - protein, 761 aa, Artificial Sequence
  STF2.HA1-2His (PR8)
MKFLVNVALVFMVVYISYIYAAQVINTNSLSLLTQNNLNKSQSALGTAIERLSSGLRINSAKDDAAGQAIANRFTANIKGLTQASRNANDGISIAQTTEGALNEINNNLQRVRELAVQSANSTNSQSDLDSIQAEITQRLNEIDRVSGQTQFNGVKVLAQDNTLTIQVGANDGETIDIDLKQINSQTLGLDSLNVQKAYDVKDTAVTTKAYANNGTTLDVSGLDDAAIKAATGGTNGTASVTGGAVKFDADNNKYFVTIGGFTGADAAKNGDYEVNVATDGTVTLAAGATKTTMPAGATTKTEVQELKDTPAVVSADAKNALIAGGVDATDANGAELVKMSYTDKNGKTIEGGYALKAGDKYYAADYDEATGAIKAKTTSYTAADGTTKTAANQLGGVDGKTEVVTIDGKTYNASKAAGHDFKAQPELAEAAAKTTENPLQKIDAALAQVDALRSDLGAVQNRFNSAITNLGNTVNNLSEARSRIEDSDYATEVSNMSRAQILQQAGTSVLAQANQVPQNVLSLLASGSGSGSKGIAPQLGKCNIAGWLLGNPECDPLLPVRSWSYIVETPNSENGICYPGDFIDYEELREQLSSVSSFERFEIFPKESSWPNHNTNGVTAACSHEGKSSFYRNLLWLTEKEGSYPKLKNSYVNKKGKEVLVLWGIHHPPNSKEQQNLYQNENAYVSVVTSNYNRRFTPEIAERPKVRDQAGRMNYYWTLLKPGDTIIFEANGNLIAPMYAFALSRGFGSGIITSHHHHHH

SEQ ID NO: 154 - protein, 762 aa, Artificial Sequence
  ngSTF2.HA1-2His (PR8)
MKFLVNVALVFMVVYISYIYAAQVINTNSLSLLTQNNLQKSQSALGTAIERLSSGLRINSAKDDAAGQAIANRFTANIKGLTQASRNANDGISIAQTTEGALNEINNNLQRVRELAVQSAQSTNSQSDLDSIQAEITQRLNEIDRVSGQTQFNGVKVLAQDNTLTIQVGANDGETIDIDLKQINSQTLGLDSLNVQKAYDVKDTAVTTKAYANQGTTLDVSGLDDAAIKAATGGTQGTASVTGGAVKFDADNNKYFVTIGGFTGADAAKNGDYEVNVATDGTVTLAAGATKTTMPAGATTKTEVQELKDTPAVVSADAKNALIAGGVDATDANGAELVKMSYTDKNGKTIEGGYALKAGDKYYAADYDEATGAIKAKTTSYTAADGTTKTAANQLGGVDGKTEVVTIDGKTYQASKAAGHDFKAQPELAEAAAKTTENPLQKIDAALAQVDALRSDLGAVQNRFNSAITNLGNTVNQLSEARSRIEDSDYATEVSQMSRAQILQQAGTSVLAQANQVPQNVLSLLASGSGSGSKGIAPLQLGKCNIAGWLLGNPECDPLLPVRSWSYIVETPNSENGICYPGDFIDYEELREQLSSVSSFERFEIFPKESSWPNHNTNGVTAACSHEGKSSFYRNLLWLTEKEGSYPKLKNSYVNKKGKEVLVLWGIHHPPNSKEQQNLYQNENAYVSVVTSNYNRRFTPEIAERPKVRDQAGRMNYYWTLLKPGDTIIFEANGNLIAPMYAFALSRGFGSGIITSHHHHHH

SEQ ID NO: 155 - protein, 762 aa, Artificial Sequence
  STF2.HA1-2mutHis (PR8)
MKFLVNVALVFMVVYISYIYAAQVINTNSLSLLTQNNLNKSQSALGTAIERLSSGLRINSAKDDAAGQAIANRFTANIKGLTQASRNANDGISIAQTTEGALNEINNNLQRVRELAVQSANSTNSQSDLDSIQAEITQRLNEIDRVSGQTQFNGVKVLAQDNTLTIQVGANDGETIDIDLKQINSQTLGLDSLNVQKAYDVKDTAVTTKAYANNGTTLDVSGLDDAAIKAATGGTNGTASVTGGAVKFDADNNKYFVTIGGFTGADAAKNGDYEVNVATDGTVTLAAGATKTTMPAGATTKTEVQELKDTPAVVSADAKNALIAGGVDATDANGAELVKMSYTDKNGKTIEGGYALKAGDKYYAADYDEATGAIKAKTTSYTAADGTTKTAANQLGGVDGKTEVVTIDGKTYNASKAAGHDFKAQPELAEAAAKTTENPLQKIDAALAQVDALRSDLGAVQNRFNSAITNLGNTVNNLSEARSRIEDSDYATEVSNMSRAQILQQAGTSVLAQANQVPQNVLSLLASGSGSGSKGAAPLQLGKCNIAGWLLGNPECDPLLPVRSWSDIAETPNSENGICYPGDFIDYEELREQLSSVSSFERFEIFPKESSWPNHNTNGVTAACSHEGKSSFYRNLLWLTEKEGSYPKLKNSYVNKKGKEVLVLWGIHHPPNSKEQQNLYQNENAYVSVVTSNYNRRFTPEIAERPKVRDQAGRMNYYWTLLKPGDTIIFEANGNLIAPMYAFALSRGFGSGIITSHHHHHH

SEQ ID NO: 156 - protein, 761 aa, Artificial Sequence
  ngSTF2.HA1-2mutHis (PR8)
MKFLVNVALVFMVVYISYIYAAQVINTNSLSLLTQNNLQKSQSALGTAIERLSSGLRINSAKDDAAGQAIANRFTANIKGLTQASRNANDGISIAQTTEGALNEINNNLQRVRELAVQSAQSTNSQSDLDSIQAEITQRLNEIDRVSGQTQFNGVKVLAQDNTLTIQVGANDGETIDIDLKQINSQTLGLDSLNVQKAYDVKDTAVTTKAYANQGTTLDVSGLDDAAIKAATGGTQGTASVTGGAVKFDADNNKYFVTIGGFTGADAAKNGDYEVNVATDGTVTLAAGATKTTMPAGATTKTEVQELKDTPAVVSADAKNALIAGGVDATDANGAELVKMSYTDKNGKTIEGGYALKAGDKYYAADYDEATGAIKAKTTSYTAADGTTKTAANQLGGVDGKTEVVTIDGKTYQASKAAGHDFKAQPELAEAAAKTTENPLQKIDAALAQVDALRSDLGAVQNRFNSAITNLGNTVNQLSEARSRIEDSDYATEVSQMSRAQILQQAGTSVLAQANQVPQNVLSLLASGSGSGSKGAAPQLGKCNIAGWLLGNPECDPLLPVRSWSDIAETPNSENGICYPGDFIDYEELREQLSSVSSFERFEIFPKESSWPNHNTNGVTAACSHEGKSSFYRNLLWLTEKEGSYPKLKNSYVNKKGKEVLVLWGIHHPPNSKEQQNLYQNENAYVSVVTSNYNRRFTPEIAERPKVRDQAGRMNYYWTLLKPGDTIIFEANGNLIAPMYAFALSRGFGSGIITSHHHHHH

SEQ ID NO: 157 - protein, 714 aa, Artificial Sequence
  STF2.HA1-3His (PR8)
MKFLVNVALVFMVVYISYIYAAQVINTNSLSLLTQNNLNKSQSALGTAIERLSSGLRINSAKDDAAGQAIANRFTANIKGLTQASRNANDGISIAQTTEGALNEINNNLQRVRELAVQSANSTNSQSDLDSIQAEITQRLNEIDRVSGQTQFNGVKVLAQDNTLTIQVGANDGETIDIDLKQINSQTLGLDSLNVQKAYDVKDTAVTTKAYANNGTTLDVSGLDDAAIKAATGGTNGTASVTGGAVKFDADNNKYFVTIGGFTGADAAKNGDYEVNVATDGTVTLAAGATKTTMPAGATTKTEVQELKDTPAVVSADAKNALIAGGVDATDANGAELVKMSYTDKNGKTIEGGYALKAGDKYYAADYDEATGAIKAKTTSYTAADGTTKTAANQLGGVDGKTEVVTIDGKTYNASKAAGHDFKAQPELAEAAAKTTENPLQKIDAALAQVDALRSDLGAVQNRFNSAITNLGNTVNNLSEARSRIEDSDYATEVSNMSRAQILQQAGTSVLAQANQVPQNVLSLLASGSGSGSNSENGCYPGDFIDYEELREQLSSVSSFERFEIFPKESSWPNHNTNGVTAACSHEGKSSFYRNLLWLTEKEGSYPKLKNSYVNKKGKEVLVLWGIHHPPNSKEQQNLYQNENAYVSVVTSNYNRRFTPEIAERPKVRDQAGRMNYYWTLLKPGDTIIFEANGNLIAPMYAFALSRGHHHHHH

SEQ ID NO: 158 - protein, 715 aa, Artificial Sequence
  STF2.HA1-3mutHis (PR8)
MKFLVNVALVFMVVYISYIYAAQVINTNSLSLLTQNNLNKSQSALGTAIERLSSGLRINSAKDDAAGQAIANRFTANIKGLTQASRNANDGISIAQTTEGALNEINNNLQRVRELAVQSANSTNSQSDLDSIQAEITQRLNEIDRVSGQTQFNGVKVLAQDNTLTIQVGANDGETIDIDLKQINSQTLGLDSLNVQKAYDVKDTAVTTKAYANNGTTLDVSGLDDAAIKAATGGTNGTASVTGGAVKFDADNNKYFVTIGGFTGADAAKNGDYEVNVATDGTVTLAAGATKTTMPAGATTKTEVQELKDTPAVVSADAKNALIAGGVDATDANGAELVKMSYTDKNGKTIEGGYALKAGDKYYAADYDEATGAIKAKTTSYTAADGTTKTAANQLGGVDGKTEVVTIDGKTYNASKAAGHDFKAQPELAEAAAKTTENPLQKIDAALAQVDALRSDLGAVQNRFNSAITNLGNTVNNLSEARSRIEDSDYATEVSNMSRAQILQQAGTSVLAQANQVPQNVLSLLASGSGSGSNSENEICYPGDFIDKEELREQLSSVSSFERFEIFPKESSWPNHNTNGVTAACSHEGKSSFYRNLLWLTEKEGSYPKLKNSYVNKKGKEVLVLWGIHHPPNSKEQQNLYQNENAYVSVVTSNYNRRFTPEIAERPKVRDQAGRMNYYWTLLKPGDTIIFEANGNLIAPMYAAALSRGHHHHHH

SEQ ID NO: 159 - protein, 729 aa, Artificial Sequence
  STF2.HA1-2 (IND)
MAQVINTNSLSLLTQNNLNKSQSALGTAIERLSSGLRINSAKDDAAGQAIANRFTANIKGLTQASRNANDGISIAQTTEGALNEINNNLQRVRELAVQSANSTNSQSDLDSIQAEITQRLNEIDRVSGQTQFNGVKVLAQDNTLTIQVGANDGETIDIDLKQINSQTLGLDSLNVQKAYDVKDTAVTTKAYANNGTTLDVSGLDDAAIKAATGGTNGTASVTGGAVKFDADNNKYFVTIGGFTGADAAKNGDYEVNVATDGTVTLAAGATKTTMPAGATTKTEVQELKDTPAVVSADAKNALIAGGVDATDANGAELVKMSYTDKNGKTIEGGYALKAGDKYYAADYDEATGAIKAKTTSYTAADGTTKTAANQLGGVDGKTEVVTIDGKTYNASKAAGHDFKAQPELAEAAAKTTENPLQKIDAALAQVDALRSDLGAVQNRFNSAITNLGNTVNNLSEARSRIEDSDYATEVSNMSRAQILQQAGTSVLAQANQVPQNVLSLLAGVKPLILRDCSVAGWLLGNPMCDEFINVPEWSYIVEKANPTNDLCYPGSFNDYEELKHLLSRINHFEKIQIIPKSSWSDHEASSGVSSACPYLGSPSFFRNVVWLIKKNSTYPTIKKSYNNTNQEDLLVLWGIHHPNDAAEQTRLYQNPTTYISIGTSTLNQRLVPKIATRSKVNGQSGRMEFFWTILKPNDAINFESNGNFIAPEYAYKIVKKGDSAIMKSE

SEQ ID NO: 160 - DNA, 2433 bp, Artificial Sequence
  STF2delta.HA0shis
atggcacaagtaatcaacactaacagtctgtcgctgctgacccagaataacctgaacaaatcccagtccgcactgggcaccgctatcgagcgtctgtcttctggtctgcgtatcaacagcgcgaaagacgatgcggcaggtcaggcgattgctaaccgtttcaccgcgaacatcaaaggtctgactcaggcttcccgtaacgctaacgacggtatctccattgcgcagaccactgaaggcgcgctgaacgaaatcaacaacaacctgcagcgtgtgcgtgaactggcggttcagtctgctaacagcaccaactcccagtctgacctcgactccatccaggctgaaatcacccagcgcctgaacgaaatcgaccgtgtatccggccagactcagttcaacggcgtgaaagtcctggcgcaggacaacaccctgaccatccaggttggcgccaacgacggtgaaactatcgatatcgatctgaagcagatcaactctcagaccctgggtctggactcactgaacgtgcatggagcgccggtggatcctgctagcccatggaccgaaaacccgctgcagaaaattgatgccgcgctggcgcaggtggatgcgctgcgctctgatctgggtgcggtacaaaaccgtttcaactctgctatcaccaacctgggcaataccgtaaacaatctgtctgaagcgcgtagccgtatcgaagattccgactacgcgaccgaagtttccaacatgtctcgcgcgcagattttgcagcaggccggtacttccgttctggcgcaggctaaccaggtcccgcagaacgtgctgtctctgttacgtgaattctctagatatccagcacagtggcggccgctcgacacaatatgtataggctaccatgcgaacaattcaaccgacactgttgacacagtactcgagaagaatgtgacagtgacacactctgttaacctgctcgaagacagccacaacggaaaactatgtagattaaaaggaatagccccactacaattggggaaatgtaacatcgccggatggcttttgggaaacccagaatgcgacccactgcttccagtgagatcatggtcctacattgtagaaacaccaaactctgagaatggaatatgttatccaggagatttcatcgactatgaggagctgagggagcaattgagctcagtgtcatcattcgaaagattcgaaatatttcccaaagaaagctcatggcccaaccacaacacaaacggagtaacggcagcatgctcccatgaggggaaaagcagtttttacagaaatttgctatggctgacggagaaggagggctcatacccaaagctgaaaaattcttatgtgaacaaaaaagggaaagaagtccttgtactgtggggtattcatcacccgcctaacagtaaggaacaacagaatctctatcagaatgaaaatgcttatgtctctgtagtgacttcaaattataacaggagatttaccccggaaatagcagaaagacccaaagtaagagatcaagctgggaggatgaactattactggaccttgctaaaacccggagacacaataatatttgaggcaaatggaaatctaatagcaccaatgtatgctttcgcactgagtagaggctttgggtccggcatcatcacctcaaacgcatcaatgcatgagtgtaacacgaagtgtcaaacacccctgggagctataaacagcagtctcccttaccagaatatacacccagtcacaataggagagtgcccaaaatacgtcaggagtgccaaattgaggatggttacaggactaaggaacattccgtccattcaatccagaggtctatttggagccattgccggttttattgaagggggatggactggaatgatagatggatggtatggttatcatcatcagaatgaacagggatcaggctatgcagcggatcaaaaaagcacacaaaatgccattaacgggattacaaacaaggtgaacactgttatcgagaaaatgaacattcaattcacagctgtgggtaaagaattcaacaaattagaaaaaaggatggaaaatttaaataaaaaagttgatgatggatttctggacatttggacatataatgcagaattgttagttctactggaaaatgaaaggactctggatttccatgactcaaatgtgaagaatctgtatgagaaagtaaaaagccaattaaagaataatgccaaagaaatcggaaatggatgttttgagttctaccacaagtgtgacaatgaatgcatggaaagtgtaagaaatgggacttatgattatcccaaatattcagaagagtcaaagttgaacagggaaaaggtagatggagtgaaattggaatcaatggggatctatcagacgcgtaccggtcatcatcaccatcaccattga

SEQ ID NO: 161 - DNA, 40 bp, Artificial Sequence
  FOR PRIMER
attctccggcggccgctcgacacaatatgtataggctacc

SEQ ID NO: 162 - DNA, 60 bp, Artificial Sequence
  REV PRIMER
agtcttgcggccgcctattaatggtgatggtgatgatgctgatagatccccattgattcc

SEQ ID NO: 163 - DNA, 1533 bp, Artificial Sequence
  HA0s PR8 template
gacacaatatgtataggctaccatgcgaacaattcaaccgacactgttgacacagtactcgagaagaatgtgacagtgacacactctgttaacctgctcgaagacagccacaacggaaaactatgtagattaaaaggaatagccccactacaattggggaaatgtaacatcgccggatggcttttgggaaacccagaatgcgacccactgcttccagtgagatcatggtcctacattgtagaaacaccaaactctgagaatggaatatgttatccaggagatttcatcgactatgaggagctgagggagcaattgagctcagtgtcatcattcgaaagattcgaaatatttcccaaagaaagctcatggcccaaccacaacacaaacggagtaacggcagcatgctcccatgaggggaaaagcagtttttacagaaatttgctatggctgacggagaaggagggctcatacccaaagctgaaaaattcttatgtgaacaaaaaagggaaagaagtccttgtactgtggggtattcatcacccgcctaacagtaaggaacaacagaatctctatcagaatgaaaatgcttatgtctctgtagtgacttcaaattataacaggagatttaccccggaaatagcagaaagacccaaagtaagagatcaagctgggaggatgaactattactggaccttgctaaaacccggagacacaataatatttgaggcaaatggaaatctaatagcaccaatgtatgctttcgcactgagtagaggctttgggtccggcatcatcacctcaaacgcatcaatgcatgagtgtaacacgaagtgtcaaacacccctgggagctataaacagcagtctcccttaccagaatatacacccagtcacaataggagagtgcccaaaatacgtcaggagtgccaaattgaggatggttacaggactaaggaacattccgtccattcaatccagaggtctatttggagccattgccggttttattgaagggggatggactggaatgatagatggatggtatggttatcatcatcagaatgaacagggatcaggctatgcagcggatcaaaaaagcacacaaaatgccattaacgggattacaaacaaggtgaacactgttatcgagaaaatgaacattcaattcacagctgtgggtaaagaattcaacaaattagaaaaaaggatggaaaatttaaataaaaaagttgatgatggatttctggacatttggacatataatgcagaattgttagttctactggaaaatgaaaggactctggatttccatgactcaaatgtgaagaatctgtatgagaaagtaaaaagccaattaaagaataatgccaaagaaatcggaaatggatgttttgagttctaccacaagtgtgacaatgaatgcatggaaagtgtaagaaatgggacttatgattatcccaaatattcagaagagtcaaagttgaacagggaaaaggtagatggagtgaaattggaatcaatggggatctatcag

SEQ ID NO: 164 - DNA, 2403 bp, Artificial Sequence
  STF2delta.HA0s
atggcacaagtaatcaacactaacagtctgtcgctgctgacccagaataacctgaacaaatcccagtccgcactgggcaccgctatcgagcgtctgtcttctggtctgcgtatcaacagcgcgaaagacgatgcggcaggtcaggcgattgctaaccgtttcaccgcgaacatcaaaggtctgactcaggcttcccgtaacgctaacgacggtatctccattgcgcagaccactgaaggcgcgctgaacgaaatcaacaacaacctgcagcgtgtgcgtgaactggcggttcagtctgctaacagcaccaactcccagtctgacctcgactccatccaggctgaaatcacccagcgcctgaacgaaatcgaccgtgtatccggccagactcagttcaacggcgtgaaagtcctggcgcaggacaacaccctgaccatccaggttggcgccaacgacggtgaaactatcgatatcgatctgaagcagatcaactctcagaccctgggtctggactcactgaacgtgcatggagcgccggtggatcctgctagcccatggaccgaaaacccgctgcagaaaattgatgccgcgctggcgcaggtggatgcgctgcgctctgatctgggtgcggtacaaaaccgtttcaactctgctatcaccaacctgggcaataccgtaaacaatctgtctgaagcgcgtagccgtatcgaagattccgactacgcgaccgaagtttccaacatgtctcgcgcgcagattttgcagcaggccggtacttccgttctggcgcaggctaaccaggtcccgcagaacgtgctgtctctgttacgtgaattctctagatatccagcacagtggcggccgctcgacacaatatgtataggctaccatgcgaacaattcaaccgacactgttgacacagtactcgagaagaatgtgacagtgacacactctgttaacctgctcgaagacagccacaacggaaaactatgtagattaaaaggaatagccccactacaattggggaaatgtaacatcgccggatggcttttgggaaacccagaatgcgacccactgcttccagtgagatcatggtcctacattgtagaaacaccaaactctgagaatggaatatgttatccaggagatttcatcgactatgaggagctgagggagcaattgagctcagtgtcatcattcgaaagattcgaaatatttcccaaagaaagctcatggcccaaccacaacacaaacggagtaacggcagcatgctcccatgaggggaaaagcagtttttacagaaatttgctatggctgacggagaaggagggctcatacccaaagctgaaaaattcttatgtgaacaaaaaagggaaagaagtccttgtactgtggggtattcatcacccgcctaacagtaaggaacaacagaatctctatcagaatgaaaatgcttatgtctctgtagtgacttcaaattataacaggagatttaccccggaaatagcagaaagacccaaagtaagagatcaagctgggaggatgaactattactggaccttgctaaaacccggagacacaataatatttgaggcaaatggaaatctaatagcaccaatgtatgctttcgcactgagtagaggctttgggtccggcatcatcacctcaaacgcatcaatgcatgagtgtaacacgaagtgtcaaacacccctgggagctataaacagcagtctcccttaccagaatatacacccagtcacaataggagagtgcccaaaatacgtcaggagtgccaaattgaggatggttacaggactaaggaacattccgtccattcaatccagaggtctatttggagccattgccggttttattgaagggggatggactggaatgatagatggatggtatggttatcatcatcagaatgaacagggatcaggctatgcagcggatcaaaaaagcacacaaaatgccattaacgggattacaaacaaggtgaacactgttatcgagaaaatgaacattcaattcacagctgtgggtaaagaattcaacaaattagaaaaaaggatggaaaatttaaataaaaaagttgatgatggatttctggacatttggacatataatgcagaattgttagttctactggaaaatgaaaggactctggatttccatgactcaaatgtgaagaatctgtatgagaaagtaaaaagccaattaaagaataatgccaaagaaatcggaaatggatgttttgagttctaccacaagtgtgacaatgaatgcatggaaagtgtaagaaatgggacttatgattatcccaaatattcagaagagtcaaagttgaacagggaaaaggtagatggagtgaaattggaatcaatggggatctatcagtag

SEQ ID NO: 165 - DNA, 40 bp, Artificial Sequence; identical to SEQ ID NO: 161
  FOR PRIMER

SEQ ID NO: 166 - DNA, 60 bp, Artificial Sequence; identical to SEQ ID NO: 162
  REV PRIMER

SEQ ID NO: 167 - DNA, 2403 bp, Artificial Sequence
  HA0s.STF2delta
gacacaatatgtataggctaccatgcgaacaattcaaccgacactgttgacacagtactcgagaagaatgtgacagtgacacactctgttaacctgctcgaagacagccacaacggaaaactatgtagattaaaaggaatagccccactacaattggggaaatgtaacatcgccggatggcttttgggaaacccagaatgcgacccactgcttccagtgagatcatggtcctacattgtagaaacaccaaactctgagaatggaatatgttatccaggagatttcatcgactatgaggagctgagggagcaattgagctcagtgtcatcattcgaaagattcgaaatatttcccaaagaaagctcatggcccaaccacaacacaaacggagtaacggcagcatgctcccatgaggggaaaagcagtttttacagaaatttgctatggctgacggagaaggagggctcatacccaaagctgaaaaattcttatgtgaacaaaaaagggaaagaagtccttgtactgtggggtattcatcacccgcctaacagtaaggaacaacagaatctctatcagaatgaaaatgcttatgtctctgtagtgacttcaaattataacaggagatttaccccggaaatagcagaaagacccaaagtaagagatcaagctgggaggatgaactattactggaccttgctaaaacccggagacacaataatatttgaggcaaatggaaatctaatagcaccaatgtatgctttcgcactgagtagaggctttgggtccggcatcatcacctcaaacgcatcaatgcatgagtgtaacacgaagtgtcaaacacccctgggagctataaacagcagtctcccttaccagaatatacacccagtcacaataggagagtgcccaaaatacgtcaggagtgccaagttgaggatggttacaggactaaggaacattccgtccattcaatccagaggtctatttggagccattgccggttttattgaagggggatggactggaatgatagatggatggtatggttatcatcatcagaatgaacagggatcaggctatgcagcggatcaaaaaagcacacaaaatgccattaacgggattacaaacaaggtgaacactgttatcgagaaaatgaacattcaattcacagctgtgggtaaagaattcaacaaattagaaaaaaggatggaaaatttaaataaaaaagttgatgatggatttctggacatttggacatataatgcagaattgttagttctactggaaaatgaaaggactctggatttccatgactcaaatgtgaagaatctgtatgagaaagtaaaaagccaattaaagaataatgccaaagaaatcggaaatggatgttttgagttctaccacaagtgtgacaatgaatgcatggaaagtgtaagaaatgggacttatgattatcccaaatattcagaagagtcaaagttgaacagggaaaaggtagatggagtgaaattggaatcaatggggatctatcaggaattctctagatatccagcacagtggcggccgctcgcacaagtaatcaacactaacagtctgtcgctgctgacccagaataacctgaacaaatcccagtccgcactgggcaccgctatcgagcgtctgtcttctggtctgcgtatcaacagcgcgaaagacgatgcggcaggtcaggcgattgctaaccgtttcaccgcgaacatcaaaggtctgactcaggcttcccgtaacgctaacgacggtatctccattgcgcagaccactgaaggcgcgctgaacgaaatcaacaacaacctgcagcgtgtgcgtgaactggcggttcagtctgctaacagcaccaactcccagtctgacctcgactccatccaggctgaaatcacccagcgcctgaacgaaatcgaccgtgtatccggccagactcagttcaacggcgtgaaagtcctggcgcaggacaacaccctgaccatccaggttggcgccaacgacggtgaaactatcgatatcgatctgaagcagatcaactctcagaccctgggtctggactcactgaacgtgcatggagcgccggtggatcctgctagcccatggaccgaaaacccgctgcagaaaattgatgccgcgctggcgcaggtggatgcgctgcgctctgatctgggtgcggtacaaaaccgtttcaactctgctatcaccaacctgggcaataccgtaaacaatctgtctgaagcgcgtagccgtatcgaagattccgactacgcgaccgaagtttccaacatgtctcgcgcgcagattttgcagcaggccggtacttccgttctggcgcaggctaaccaggtcccgcagaacgtgctgtctctgttacgttaatag

SEQ ID NO: 168 - DNA, 33 bp, Artificial Sequence
  FOR PRIMER
aggcaagatctgacacaatatgtataggctacc

SEQ ID NO: 169 - DNA, 36 bp, Artificial Sequence
  REV PRIMER
agtcagacgcgtctattaacgtaacagagacagcac

SEQ ID NO: 170 - DNA, 1566 bp, Artificial Sequence
  Ha0s.his
gacacaatatgtataggctaccatgcgaacaattcaaccgacactgttgacacagtactcgagaagaatgtgacagtgacacactctgttaacctgctcgaagacagccacaacggaaaactatgtagattaaaaggaatagccccactacaattggggaaatgtaacatcgccggatggcttttgggaaacccagaatgcgacccactgcttccagtgagatcatggtcctacattgtagaaacaccaaactctgagaatggaatatgttatccaggagatttcatcgactatgaggagctgagggagcaattgagctcagtgtcatcattcgaaagattcgaaatatttcccaaagaaagctcatggcccaaccacaacacaaacggagtaacggcagcatgctcccatgaggggaaaagcagtttttacagaaatttgctatggctgacggagaaggagggctcatacccaaagctgaaaaattcttatgtgaacaaaaaagggaaagaagtccttgtactgtggggtattcatcacccgcctaacagtaaggaacaacagaatctctatcagaatgaaaatgcttatgtctctgtagtgacttcaaattataacaggagatttaccccggaaatagcagaaagacccaaagtaagagatcaagctgggaggatgaactattactggaccttgctaaaacccggagacacaataatatttgaggcaaatggaaatctaatagcaccaatgtatgctttcgcactgagtagaggctttgggtccggcatcatcacctcaaacgcatcaatgcatgagtgtaacacgaagtgtcaaacacccctgggagctataaacagcagtctcccttaccagaatatacacccagtcacaataggagagtgcccaaaatacgtcaggagtgccaaattgaggatggttacaggactaaggaacattccgtccattcaatccagaggtctatttggagccattgccggttttattgaagggggatggactggaatgatagatggatggtatggttatcatcatcagaatgaacagggatcaggctatgcagcggatcaaaaaagcacacaaaatgccattaacgggattacaaacaaggtgaacactgttatcgagaaaatgaacattcaattcacagctgtgggtaaagaattcaacaaattagaaaaaaggatggaaaatttaaataaaaaagttgatgatggatttctggacatttggacatataatgcagaattgttagttctactggaaaatgaaaggactctggatttccatgactcaaatgtgaagaatctgtatgagaaagtaaaaagccaattaaagaataatgccaaagaaatcggaaatggatgttttgagttctaccacaagtgtgacaatgaatgcatggaaagtgtaagaaatgggacttatgattatcccaaatattcagaagagtcaaagttgaacagggaaaaggtagatggagtgaaattggaatcaatggggatctatcagacgcgtaccggtcatcatcaccatcaccattga

SEQ ID NO: 171 - DNA, 40 bp, Artificial Sequence; identical to SEQ ID NO: 161
  FOR PRIMER

SEQ ID NO: 172 - DNA, 60 bp, Artificial Sequence; identical to SEQ ID NO: 162
  HA0s

SEQ ID NO: 173 - DNA, 1533 bp, Artificial Sequence; identical to SEQ ID NO: 163
  HA0s

SEQ ID NO: 174 - DNA, 33 bp, Artificial Sequence; identical to SEQ ID NO: 168
  FOR PRIMER

SEQ ID NO: 175 - DNA, 36 bp, Artificial Sequence; identical to SEQ ID NO: 169
  REV PRIMER

SEQ ID NO: 176 - protein, 517 aa, Artificial Sequence
  HA0sHis (PR8)
DTICIGYHANNSTDTVDTVLEKNVTVTHSVNLLEDSHNGKLCRLKGIAPLQLGKCNIAGWLLGNPECDPLLPVRSWSYIVETPNSENGICYPGDFIDYEELREQLSSVSSFERFEIFPKESSWPNHNTNGVTAACSHEGKSSFYRNLLWLTEKEGSYPKLKNSYVNKKGKEVLVLWGIHHPPNSKEQQNLYQNENAYVSVVTSNYNRRFTPEIAERPKVRDQAGRMNYYWTLLKPGDTIIFEANGNLIAPMYAFALSRGFGSGIITSNASMHECNTKCQTPLGAINSSLPYQNIHPVTIGECPKYVRSAKLRMVTGLRNIPSIQSRGLFGAIAGFIEGGWTGMIDGWYGYHHQNEQGSGYAADQKSTQNAINGITNKVNTVIEKMNIQFTAVGKEFNKLEKRMENLNKKVDDGFLDIWTYNAELLVLLENERTLDFHDSNVKNLYEKVKSQLKNNAKEIGNGCFEFYHKCDNECMESVRNGTYDYPKYSEESKLNREKVDGVKLESMGIYQHHHHHH

SEQ ID NO: 177 - protein, 800 aa, Artificial Sequence
  STF2delta.HA0s (PR8)
MAQVINTNSLSLLTQNNLNKSQSALGTAIERLSSGLRINSAKDDAAGQAIANRFTANIKGLTQASRNANDGISIAQTTEGALNEINNNLQRVRELAVQSANSTNSQSDLDSIQAEITQRLNEIDRVSGQTQFNGVKVLAQDNTLTIQVGANDGETIDIDLKQINSQTLGLDSLNVHGAPVDPASPWTENPLQKIDAALAQVDALRSDLGAVQNRFNSAITNLGNTVNNLSEARSRIEDSDYATEVSNMSRAQILQQAGTSVLAQANQVPQNVLSLLREFSRYPAQWRPLDTICIGYHANNSTDTVDTVLEKNVTVTHSVNLLEDSHNGKLCRLKGIAPLQLGKCNIAGWLLGNPECDPLLPVRSWSYIVETPNSENGICYPGDFIDYEELREQLSSVSSFERFEIFPKESSWPNHNTNGVTAACSHEGKSSFYRNLLWLTEKEGSYPKLKNSYVNKKGKEVLVLWGIHHPPNSKEQQNLYQNENAYVSVVTSNYNRRFTPEIAERPKVRDQAGRMNYYWTLLKPGDTIIFEANGNLIAPMYAFALSRGFGSGIITSNASMHECNTKCQTPLGAINSSLPYQNIHPVTIGECPKYVRSAKLRMVTGLRNIPSIQSRGLFGAIAGFIEGGWTGMIDGWYGYHHQNEQGSGYAADQKSTQNAINGITNKVNTVIEKMNIQFTAVGKEFNKLEKRMENLNKKVDDGFLDIWTYNAELLVLLENERTLDFHDSNVKNLYEKVKSQLKNNAKEIGNGCFEFYHKCDNECMESVRNGTYDYPKYSEESKLNREKVDGVKLESMGIYQ

SEQ ID NO: 178 - DNA, 1518 bp, Artificial Sequence
  STF2
atggcacaagtaatcaacactaacagtctgtcgctgctgacccagaataacctgaacaaatcccagtccgcactgggcaccgctatcgagcgtctgtcttctggtctgcgtatcaacagcgcgaaagacgatgcggcaggtcaggcgattgctaaccgtttcaccgcgaacatcaaaggtctgactcaggcttcccgtaacgctaacgacggtatctccattgcgcagaccactgaaggcgcgctgaacgaaatcaacaacaacctgcagcgtgtgcgtgaactggcggttcagtctgctaacagcaccaactcccagtctgacctcgactccatccaggctgaaatcacccagcgcctgaacgaaatcgaccgtgtatccggccagactcagttcaacggcgtgaaagtcctggcgcaggacaacaccctgaccatccaggttggcgccaacgacggtgaaactatcgatatcgatctgaagcagatcaactctcagaccctgggtctggactcactgaacgtgcagaaagcgtatgatgtgaaagatacagcagtaacaacgaaagcttatgccaataatggtactacactggatgtatcgggtcttgatgatgcagctattaaagcggctacgggtggtacgaatggtacggcttctgtaaccggtggtgcggttaaatttgacgcagataataacaagtactttgttactattggtggctttactggtgctgatgccgccaaaaatggcgattatgaagttaacgttgctactgacggtacagtaacccttgcggctggcgcaactaaaaccacaatgcctgctggtgcgacaactaaaacagaagtacaggagttaaaagatacaccggcagttgtttcagcagatgctaaaaatgccttaattgctggcggcgttgacgctaccgatgctaatggcgctgagttggtcaaaatgtcttataccgataaaaatggtaagacaattgaaggcggttatgcgcttaaagctggcgataagtattacgccgcagattacgatgaagcgacaggagcaattaaagctaaaactacaagttatactgctgctgacggcactaccaaaacagcggctaaccaactgggtggcgtagacggtaaaaccgaagtcgttactatcgacggtaaaacctacaatgccagcaaagccgctggtcatgatttcaaagcacaaccagagctggcggaagcagccgctaaaaccaccgaaaacccgctgcagaaaattgatgccgcgctggcgcaggtggatgcgctgcgctctgatctgggtgcggtacaaaaccgtttcaactctgctatcaccaacctgggcaataccgtaaacaatctgtctgaagcgcgtagccgtatcgaagattccgactacgcgaccgaagtttccaacatgtctcgcgcgcagattctgcagcaggccggtacttccgttctggcgcaggctaaccaggtcccgcagaacgtgctgtctctgttacgt

SEQ ID NO: 179 - protein, 299 aa, Artificial Sequence
  HA1-1his (PR8)
MKFLVNVALVFMVVYISYIYASHNGKLCRLKGIAPLQLGKCNIAGWLLGNPECDPLLPVRSWSYIVETPNSENGICYPGDFIDYEELREQLSSVSSFERFEIFPKESSWPNHNTNGVTAACSHEGKSSFYRNLLWLTEKEGSYPKLKNSYVNKKGKEVLVLWGIHHPPNSKEQQNLYQNENAYVSVVTSNYNRRFTPEIAERPKVRDQAGRMNYYWTLLKPGDTIIFEANGNLIAPMYAFALSRGFGSGIITSNASMHECNTKCQTPLGAINSSLPYQNIHPVTIGECPKYVRHHHHHH

SEQ ID NO: 180 - protein, 301 aa, Artificial Sequence
  HA1-1his (VN)
MKFLVNVALVFMVVYISYIYAEKKHNGKLCDLDGVKPLILRDCSVAGWLLGNPMCDEFINVPEWSYIVEKANPVNDLCYPGDFNDYEELKHLLSRINHFEKIQIIPKSSWSSHEASLGVSSACPYQGKSSFFRNVVWLIKKNSTYPTIKRSYNNTNQEDLLVLWGIHHPNDAAEQTKLYQNPTTYISVGTSTLNQRLVPRIATRSKVNGQSGRMEFFWTILKPNDAINFESNGNFIAPEYAYKIVKKGDSTIMKSELEYGNCNTKCQTPMGAINSSMPFHNIHPLTIGECPKYVKHHHHHH

SEQ ID NO: 181 - protein, 301 aa, Artificial Sequence
  HA1-1his (IND)
MKFLVNVALVFMVVYISYIYAEKTHNGKLCDLDGVKPLILRDCSVAGWLLGNPMCDEFINVPEWSYIVEKANPTNDLCYPGSFNDYEELKHLLSRINHFEKIQIIPKSSWSDHEASSGVSSACPYLGSPSFFRNVVWLIKKNSTYPTIKKSYNNTNQEDLLVLWGIHHPNDAAEQTRLYQNPTTYISIGTSTLNQRLVPKIATRSKVNGQSGRMEFFWTILKPNDAINFESNGNFIAPEYAYKIVKKGDSAIMKSELEYGNCNTKCQTPMGAINSSMPFHNIHPLTIGECPKYVKHHHHHH

SEQ ID NO: 182 - protein, 299 aa, Artificial Sequence
  HA1-1his (NC)
MKFLVNVALVFMVVYISYIYASHNGKLCLLKGIAPLQLGNCSVAGWILGNPECELLISKESWSYIVETPNPENGTCYPGYFADYEELREQLSSVSSFERFEIFPKESSWPNHTVTGVSASCSHNGKSSFYRNLLWLTGKNGLYPNLSKSYVNNKEKEVLVLWGVHHPPNIGNQRALYHTENAYVSVVSSHYSRRFTPEIAKRPKVRDQEGRINYYWTLLEPGDTIIFEANGNLIAPWYAFALSRGFGSGIITSNAPMDECDAKCQTPQGAINSSLPFQNVHPVTIGECPKYVRHHHHHH

SEQ ID NO: 183 - DNA, 888 bp, Artificial Sequence
  HA1-1 (MAL)
accactaccccaaccaaatctcacttcgcaaacctgaaaggcactgaaacccgtggcaagctgtgtccgaagtgtctgaactgcaccgatctggacgtcgcactgggtcgtccgaaatgtactggtaacattccgtccgcgcgtgtctccatcctgcatgaagtgcgtccagtgacctccggctgttttccgattatgcatgatcgtactaaaatccgtcagctgccgaacctgctgcgtggttacgaacacattcgtctgtccacccataacgttatcaacgcggaaaacgcgccgggcggtagctataaaatcggtacctctggttcttgcccgaacgtgactaacggtaacggcttctttgcaaccatggcctgggcggtcccgaaaaacgacaacaacaagaccgcgaccaattccctgaccatcgaagtcccgtatatctgcaccgaaggtgaagatcaaatcacggtttggggcttccactccgacaacgaggcacaaatggcgaaactgtacggtgacagcaaaccgcaaaaattcactagctccgctaacggtgttaccacccactacgtttcccagatcggtggtttcccaaaccagaccgaagatggtggtctgccgcagtccggtcgcatcgttgtagattatatggtgcagaaaagcggtaaaaccggtaccatcacctaccagcgtggcatcctgctgccgcagaaagtttggtgcgcttccggtcgtagcaaagtaatcaaaggttccctgccgctgatcggtgaagcagactgcctgcacgagaaatacggcggtctgaacaaaagcaagccgtactataccggcgaacatgcgaaagcaattggtaactgtccaatttgggtgaaatagtag

SEQ ID NO: 184 - DNA, 2406 bp, Artificial Sequence
  STF2.HA1-1 (MAL)
atggcacaagtaatcaacactaacagtctgtcgctgctgacccagaataacctgaacaaatcccagtccgcactgggcaccgctatcgagcgtctgtcttctggtctgcgtatcaacagcgcgaaagacgatgcggcaggtcaggcgattgctaaccgtttcaccgcgaacatcaaaggtctgactcaggcttcccgtaacgctaacgacggtatctccattgcgcagaccactgaaggcgcgctgaacgaaatcaacaacaacctgcagcgtgtgcgtgaactggcggttcagtctgctaacagcaccaactcccagtctgacctcgactccatccaggctgaaatcacccagcgcctgaacgaaatcgaccgtgtatccggccagactcagttcaacggcgtgaaagtcctggcgcaggacaacaccctgaccatccaggttggcgccaacgacggtgaaactatcgatatcgatctgaagcagatcaactctcagaccctgggtctggactcactgaacgtgcagaaagcgtatgatgtgaaagatacagcagtaacaacgaaagcttatgccaataatggtactacactggatgtatcgggtcttgatgatgcagctattaaagcggctacgggtggtacgaatggtacggcttctgtaaccggtggtgcggttaaatttgacgcagataataacaagtactttgttactattggtggctttactggtgctgatgccgccaaaaatggcgattatgaagttaacgttgctactgacggtacagtaacccttgcggctggcgcaactaaaaccacaatgcctgctggtgcgacaactaaaacagaagtacaggagttaaaagatacaccggcagttgtttcagcagatgctaaaaatgccttaattgctggcggcgttgacgctaccgatgctaatggcgctgagttggtcaaaatgtcttataccgataaaaatggtaagacaattgaaggcggttatgcgcttaaagctggcgataagtattacgccgcagattacgatgaagcgacaggagcaattaaagctaaaactacaagttatactgctgctgacggcactaccaaaacagcggctaaccaactgggtggcgtagacggtaaaaccgaagtcgttactatcgacggtaaaacctacaatgccagcaaagccgctggtcatgatttcaaagcacaaccagagctggcggaagcagccgctaaaaccaccgaaaacccgctgcagaaaattgatgccgcgctggcgcaggtggatgcgctgcgctctgatctgggtgcggtacaaaaccgtttcaactctgctatcaccaacctgggcaataccgtaaacaatctgtctgaagcgcgtagccgtatcgaagattccgactacgcgaccgaagtttccaacatgtctcgcgcgcagattctgcagcaggccggtacttccgttctggcgcaggctaaccaggtcccgcagaacgtgctgtctctgttagcgaccactaccccaaccaaatctcacttcgcaaacctgaaaggcactgaaacccgtggcaagctgtgtccgaagtgtctgaactgcaccgatctggacgtcgcactgggtcgtccgaaatgtactggtaacattccgtccgcgcgtgtctccatcctgcatgaagtgcgtccagtgacctccggctgttttccgattatgcatgatcgtactaaaatccgtcagctgccgaacctgctgcgtggttacgaacacattcgtctgtccacccataacgttatcaacgcggaaaacgcgccgggcggtagctataaaatcggtacctctggttcttgcccgaacgtgactaacggtaacggcttctttgcaaccatggcctgggcggtcccgaaaaacgacaacaacaagaccgcgaccaattccctgaccatcgaagtcccgtatatctgcaccgaaggtgaagatcaaatcacggtttggggcttccactccgacaacgaggcacaaatggcgaaactgtacggtgacagcaaaccgcaaaaattcactagctccgctaacggtgttaccacccactacgtttcccagatcggtggtttcccaaaccagaccgaagatggtggtctgccgcagtccggtcgcatcgttgtagattatatggtgcagaaaagcggtaaaaccggtaccatcacctaccagcgtggcatcctgctgccgcagaaagtttggtgcgcttccggtcgtagcaaagtaatcaaaggttccctgccgctgatcggtgaagcagactgcctgcacgagaaatacggcggtctgaacaaaagcaagccgtactataccggcgaacatgcgaaagcaattggtaactgtccaatttgggtgaaatagtag

SEQ ID NO: 185 - DNA, 729 bp, Artificial Sequence
  HA1-2 (MAL)
aaaggcactgaaacccgtggcaagctgtgtccgaagtgtctgaactgcaccgatctggacgtcgcactgggtcgtccgaaatgtactggtaacattccgtccgcgcgtgtctccatcctgcatgaagtgcgtccagtgacctccggctgttttccgattatgcatgatcgtactaaaatccgtcagctgccgaacctgctgcgtggttacgaacacattcgtctgtccacccataacgttatcaacgcggaaaacgcgccgggcggtagctataaaatcggtacctctggttcttgcccgaacgtgactaacggtaacggcttctttgcaaccatggcctgggcggtcccgaaaaacgacaacaacaagaccgcgaccaattccctgaccatcgaagtcccgtatatctgcaccgaaggtgaagatcaaatcacggtttggggcttccactccgacaacgaggcacaaatggcgaaactgtacggtgacagcaaaccgcaaaaattcactagctccgctaacggtgttaccacccactacgtttcccagatcggtggtttcccaaaccagaccgaagatggtggtctgccgcagtccggtcgcatcgttgtagattatatggtgcagaaaagcggtaaaaccggtaccatcacctaccagcgtggcatcctgctgccgcagaaagtttggtgcgcttccggtcgtagcaaagtaatcaaaggttgatag

SEQ ID NO: 186 - DNA, 2247 bp, Artificial Sequence
  STF2.HA1-2 (MAL)
atggcacaagtaatcaacactaacagtctgtcgctgctgacccagaataacctgaacaaatcccagtccgcactgggcaccgctatcgagcgtctgtcttctggtctgcgtatcaacagcgcgaaagacgatgcggcaggtcaggcgattgctaaccgtttcaccgcgaacatcaaaggtctgactcaggcttcccgtaacgctaacgacggtatctccattgcgcagaccactgaaggcgcgctgaacgaaatcaacaacaacctgcagcgtgtgcgtgaactggcggttcagtctgctaacagcaccaactcccagtctgacctcgactccatccaggctgaaatcacccagcgcctgaacgaaatcgaccgtgtatccggccagactcagttcaacggcgtgaaagtcctggcgcaggacaacaccctgaccatccaggttggcgccaacgacggtgaaactatcgatatcgatctgaagcagatcaactctcagaccctgggtctggactcactgaacgtgcagaaagcgtatgatgtgaaagatacagcagtaacaacgaaagcttatgccaataatggtactacactggatgtatcgggtcttgatgatgcagctattaaagcggctacgggtggtacgaatggtacggcttctgtaaccggtggtgcggttaaatttgacgcagataataacaagtactttgttactattggtggctttactggtgctgatgccgccaaaaatggcgattatgaagttaacgttgctactgacggtacagtaacccttgcggctggcgcaactaaaaccacaatgcctgctggtgcgacaactaaaacagaagtacaggagttaaaagatacaccggcagttgtttcagcagatgctaaaaatgccttaattgctggcggcgttgacgctaccgatgctaatggcgctgagttggtcaaaatgtcttataccgataaaaatggtaagacaattgaaggcggttatgcgcttaaagctggcgataagtattacgccgcagattacgatgaagcgacaggagcaattaaagctaaaactacaagttatactgctgctgacggcactaccaaaacagcggctaaccaactgggtggcgtagacggtaaaaccgaagtcgttactatcgacggtaaaacctacaatgccagcaaagccgctggtcatgatttcaaagcacaaccagagctggcggaagcagccgctaaaaccaccgaaaacccgctgcagaaaattgatgccgcgctggcgcaggtggatgcgctgcgctctgatctgggtgcggtacaaaaccgtttcaactctgctatcaccaacctgggcaataccgtaaacaatctgtctgaagcgcgtagccgtatcgaagattccgactacgcgaccgaagtttccaacatgtctcgcgcgcagattctgcagcaggccggtacttccgttctggcgcaggctaaccaggtcccgcagaacgtgctgtctctgttagcgaaaggcactgaaacccgtggcaagctgtgtccgaagtgtctgaactgcaccgatctggacgtcgcactgggtcgtccgaaatgtactggtaacattccgtccgcgcgtgtctccatcctgcatgaagtgcgtccagtgacctccggctgttttccgattatgcatgatcgtactaaaatccgtcagctgccgaacctgctgcgtggttacgaacacattcgtctgtccacccataacgttatcaacgcggaaaacgcgccgggcggtagctataaaatcggtacctctggttcttgcccgaacgtgactaacggtaacggcttctttgcaaccatggcctgggcggtcccgaaaaacgacaacaacaagaccgcgaccaattccctgaccatcgaagtcccgtatatctgcaccgaaggtgaagatcaaatcacggtttggggcttccactccgacaacgaggcacaaatggcgaaactgtacggtgacagcaaaccgcaaaaattcactagctccgctaacggtgttaccacccactacgtttcccagatcggtggtttcccaaaccagaccgaagatggtggtctgccgcagtccggtcgcatcgttgtagattatatggtgcagaaaagcggtaaaaccggtaccatcacctaccagcgtggcatcctgctgccgcagaaagtttggtgcgcttccggtcgtagcaaagtaatcaaaggttgatag

SEQ ID NO: 187 - DNA, 725 bp, Artificial Sequence
  HA1-2 (SH)
aaaggcactcgtacccgcggtaagctgtgcccggactgcctgaactgtaccgatctggatgttgcactgggtcgtccgatgtgcgttggtaccaccccgtctgcgaaagccagcatcctgcacgaagttcgcccggttacttccggttgtttcccgattatgcatgatcgtaccaaaattcgtcagctgccaaacctgctgcgtggctatgaaaacattcgtctgtccactcaaaacgtaatcgatgcagaaaaagcgctgggtggcccgtatcgtctgggtaccagcggctcctgcccgaacgcgacgagcaaaagcggcttcttcgccaccatggcttgggccgttccgaaagacaacaacaaaaacgctacgaacccgctgaccgtcgaagtcccgtacatctgcaccgaaggcgaagatcagatcactgtgtggggcttccacagcgatgataagacccagatgaaaaatctgtacggtgactccaacccgcagaaattcacctcttctgctaacggtgtaacgacccactacgtttctcagatcggtggtttcccggaccagacggaagatggcggtctgcctcagtccggccgcatcgtagttgattacatggtccagaaaccgggtaagactggtaccattgtttaccagcgtggtgtactgctgccgcagaaggtctggtgtgcttccggccgttccaaggtcattaagggctgata

SEQ ID NO: 188 - DNA, 2244 bp, Artificial Sequence
  STF2.HA1-2 (SH)
atggcacaagtaatcaacactaacagtctgtcgctgctgacccagaataacctgaacaaatcccagtccgcactgggcaccgctatcgagcgtctgtcttctggtctgcgtatcaacagcgcgaaagacgatgcggcaggtcaggcgattgctaaccgtttcaccgcgaacatcaaaggtctgactcaggcttcccgtaacgctaacgacggtatctccattgcgcagaccactgaaggcgcgctgaacgaaatcaacaacaacctgcagcgtgtgcgtgaactggcggttcagtctgctaacagcaccaactcccagtctgacctcgactccatccaggctgaaatcacccagcgcctgaacgaaatcgaccgtgtatccggccagactcagttcaacggcgtgaaagtcctggcgcaggacaacaccctgaccatccaggttggcgccaacgacggtgaaactatcgatatcgatctgaagcagatcaactctcagaccctgggtctggactcactgaacgtgcagaaagcgtatgatgtgaaagatacagcagtaacaacgaaagcttatgccaataatggtactacactggatgtatcgggtcttgatgatgcagctattaaagcggctacgggtggtacgaatggtacggcttctgtaaccggtggtgcggttaaatttgacgcagataataacaagtactttgttactattggtggctttactggtgctgatgccgccaaaaatggcgattatgaagttaacgttgctactgacggtacagtaacccttgcggctggcgcaactaaaaccacaatgcctgctggtgcgacaactaaaacagaagtacaggagttaaaagatacaccggcagttgtttcagcagatgctaaaaatgccttaattgctggcggcgttgacgctaccgatgctaatggcgctgagttggtcaaaatgtcttataccgataaaaatggtaagacaattgaaggcggttatgcgcttaaagctggcgataagtattacgccgcagattacgatgaagcgacaggagcaattaaagctaaaactacaagttatactgctgctgacggcactaccaaaacagcggctaaccaactgggtggcgtagacggtaaaaccgaagtcgttactatcgacggtaaaacctacaatgccagcaaagccgctggtcatgatttcaaagcacaaccagagctggcggaagcagccgctaaaaccaccgaaaacccgctgcagaaaattgatgccgcgctggcgcaggtggatgcgctgcgctctgatctgggtgcggtacaaaaccgtttcaactctgctatcaccaacctgggcaataccgtaaacaatctgtctgaagcgcgtagccgtatcgaagattccgactacgcgaccgaagtttccaacatgtctcgcgcgcagattctgcagcaggccggtacttccgttctggcgcaggctaaccaggtcccgcagaacgtgctgtctctgttagcgaaaggcactcgtacccgcggtaagctgtgcccggactgcctgaactgtaccgatctggatgttgcactgggtcgtccgatgtgcgttggtaccaccccgtctgcgaaagccagcatcctgcacgaagttcgcccggttacttccggttgtttcccgattatgcatgatcgtaccaaaattcgtcagctgccaaacctgctgcgtggctatgaaaacattcgtctgtccactcaaaacgtaatcgatgcagaaaaagcgctgggtggcccgtatcgtctgggtaccagcggctcctgcccgaacgcgacgagcaaaagcggcttcttcgccaccatggcttgggccgttccgaaagacaacaacaaaaacgctacgaacccgctgaccgtcgaagtcccgtacatctgcaccgaaggcgaagatcagatcactgtgtggggcttccacagcgatgataagacccagatgaaaaatctgtacggtgactccaacccgcagaaattcacctcttctgctaacggtgtaacgacccactacgtttctcagatcggtggtttcccggaccagacggaagatggcggtctgcctcagtccggccgcatcgtagttgattacatggtccagaaaccgggtaagactggtaccattgtttaccagcgtggtgtactgctgccgcagaaggtctggtgtgcttccggccgttccaaggtcattaagggctgatag

SEQ ID NO: 189 - DNA, 726 bp, Artificial Sequence
  HA1-2 (Lee)
aaaggcactcagacccgtggcaagctgtgtccgaactgtttcaactgcaccgatctggacgttgcactgggtcgtccgaaatgcatgggtaacatcccgtctgcgaaggtaagcatcctgcacgaagttaaaccggtaaccagcggctgtttcccgatcatgcacgacaaaactaaaattcgtcagctgccgaacctgctgcgtggttatgagaacattcgtctgtctacctctaatgttatcaacgcggagactgcaccaggtggcccatacaaagtaggtaccagcggttcctgtccgaacgttgcgaatcgtaacggcttcttcaacactatggcgtgggttatcccgaaagataacaataaaactgcaattaacccggtaactgtagaagttccgtacatctgctccgaaggcgaggaccagattacggtatggggctttcacagcgacgataaaacccagatggagcgtctgtacggtgactctaacccgcagaaattcacctcctccgcgaacggcgttaccacccactatgtttctcagatcggcggtttcccgaatcagaccgaagacgaaggcctgaagcagtccggccgtattgttgtagactacatggttcagaagccgggcaaaactggtaccattgtataccagcgcggcatcctgctgccgcagaaagtttggtgcgcttccggtcgtagcaaagtaatcaaaggttgatag

SEQ ID NO: 190 - DNA, 2244 bp, Artificial Sequence
  STF2.HA1-2 (Lee)
atggcacaagtaatcaacactaacagtctgtcgctgctgacccagaataacctgaacaaatcccagtccgcactgggcaccgctatcgagcgtctgtcttctggtctgcgtatcaacagcgcgaaagacgatgcggcaggtcaggcgattgctaaccgtttcaccgcgaacatcaaaggtctgactcaggcttcccgtaacgctaacgacggtatctccattgcgcagaccactgaaggcgcgctgaacgaaatcaacaacaacctgcagcgtgtgcgtgaactggcggttcagtctgctaacagcaccaactcccagtctgacctcgactccatccaggctgaaatcacccagcgcctgaacgaaatcgaccgtgtatccggccagactcagttcaacggcgtgaaagtcctggcgcaggacaacaccctgaccatccaggttggcgccaacgacggtgaaactatcgatatcgatctgaagcagatcaactctcagaccctgggtctggactcactgaacgtgcagaaagcgtatgatgtgaaagatacagcagtaacaacgaaagcttatgccaataatggtactacactggatgtatcgggtcttgatgatgcagctattaaagcggctacgggtggtacgaatggtacggcttctgtaaccggtggtgcggttaaatttgacgcagataataacaagtactttgttactattggtggctttactggtgctgatgccgccaaaaatggcgattatgaagttaacgttgctactgacggtacagtaacccttgcggctggcgcaactaaaaccacaatgcctgctggtgcgacaactaaaacagaagtacaggagttaaaagatacaccggcagttgtttcagcagatgctaaaaatgccttaattgctggcggcgttgacgctaccgatgctaatggcgctgagttggtcaaaatgtcttataccgataaaaatggtaagacaattgaaggcggttatgcgcttaaagctggcgataagtattacgccgcagattacgatgaagcgacaggagcaattaaagctaaaactacaagttatactgctgctgacggcactaccaaaacagcggctaaccaactgggtggcgtagacggtaaaaccgaagtcgttactatcgacggtaaaacctacaatgccagcaaagccgctggtcatgatttcaaagcacaaccagagctggcggaagcagccgctaaaaccaccgaaaacccgctgcagaaaattgatgccgcgctggcgcaggtggatgcgctgcgctctgatctgggtgcggtacaaaaccgtttcaactctgctatcaccaacctgggcaataccgtaaacaatctgtctgaagcgcgtagccgtatcgaagattccgactacgcgaccgaagtttccaacatgtctcgcgcgcagattctgcagcaggccggtacttccgttctggcgcaggctaaccaggtcccgcagaacgtgctgtctctgttagcgaaaggcactcagacccgtggcaagctgtgtccgaactgtttcaactgcaccgatctggacgttgcactgggtcgtccgaaatgcatgggtaacatcccgtctgcgaaggtaagcatcctgcacgaagttaaaccggtaaccagcggctgtttcccgatcatgcacgacaaaactaaaattcgtcagctgccgaacctgctgcgtggttatgagaacattcgtctgtctacctctaatgttatcaacgcggagactgcaccaggtggcccatacaaagtaggtaccagcggttcctgtccgaacgttgcgaatcgtaacggcttcttcaacactatggcgtgggttatcccgaaagataacaataaaactgcaattaacccggtaactgtagaagttccgtacatctgctccgaaggcgaggaccagattacggtatggggctttcacagcgacgataaaacccagatggagcgtctgtacggtgactctaacccgcagaaattcacctcctccgcgaacggcgttaccacccactatgtttctcagatcggcggtttcccgaatcagaccgaagacgaaggcctgaagcagtccggccgtattgttgtagactacatggttcagaagccgggcaaaactggtaccattgtataccagcgcggcatcctgctgccgcagaaagtttggtgcgcttccggtcgtagcaaagtaatcaaaggttgatag

SEQ ID NO: 191 - DNA, 729 bp, Artificial Sequence
  HA1-2 (Ohio)
aaaggcactaaaacccgtggcaagctgtgtccgaagtgtctgaactgcaccgatctggacgtcgcactgggtcgtccgaaatgtactggtaacattccgtccgcggaagtctccatcctgcatgaagtgcgtccagtgacctccggctgttttccgattatgcatgatcgtactaaaatccgtcagctgccgaacctgctgcgtggttacgaacacattcgtctgtccacccataacgttatcaacgcggaaaaggcgccgggcggtccctataaaatcggtacctctggttcttgcccgaacgtgactaacggtaacggcttctttgcaaccatggcctgggcggtcccgaaaaacgacaacaacaagaccgcgaccaattccctgaccatcgaagtcccgtatatctgcaccgaaggtgaagatcaaatcacgatttggggcttccactccgacagcgagacacaaatggcgaaactgtacggtgacagcaaaccgcaaaaattcactagctccgctaacggtgttaccacccactacgtttcccagatcggtggtttcccaaaccagaccgaagatggtggtctgccgcagtccggtcgcatcgttgtagattatatggtgcagaaaagcggtaaaaccggtaccatcacctaccagcgtggcatcctgctgccgcagaaagtttggtgcgcttccggtcgtagcaaagtaatcaaaggttgatag

SEQ ID NO: 192 - DNA, 2247 bp, Artificial Sequence
  STF2.HA1-2 (Ohio)
atggcacaagtaatcaacactaacagtctgtcgctgctgacccagaataacctgaacaaatcccagtccgcactgggcaccgctatcgagcgtctgtcttctggtctgcgtatcaacagcgcgaaagacgatgcggcaggtcaggcgattgctaaccgtttcaccgcgaacatcaaaggtctgactcaggcttcccgtaacgctaacgacggtatctccattgcgcagaccactgaaggcgcgctgaacgaaatcaacaacaacctgcagcgtgtgcgtgaactggcggttcagtctgctaacagcaccaactcccagtctgacctcgactccatccaggctgaaatcacccagcgcctgaacgaaatcgaccgtgtatccggccagactcagttcaacggcgtgaaagtcctggcgcaggacaacaccctgaccatccaggttggcgccaacgacggtgaaactatcgatatcgatctgaagcagatcaactctcagaccctgggtctggactcactgaacgtgcagaaagcgtatgatgtgaaagatacagcagtaacaacgaaagcttatgccaataatggtactacactggatgtatcgggtcttgatgatgcagctattaaagcggctacgggtggtacgaatggtacggcttctgtaaccggtggtgcggttaaatttgacgcagataataacaagtactttgttactattggtggctttactggtgctgatgccgccaaaaatggcgattatgaagttaacgttgctactgacggtacagtaacccttgcggctggcgcaactaaaaccacaatgcctgctggtgcgacaactaaaacagaagtacaggagttaaaagatacaccggcagttgtttcagcagatgctaaaaatgccttaattgctggcggcgttgacgctaccgatgctaatggcgctgagttggtcaaaatgtcttataccgataaaaatggtaagacaattgaaggcggttatgcgcttaaagctggcgataagtattacgccgcagattacgatgaagcgacaggagcaattaaagctaaaactacaagttatactgctgctgacggcactaccaaaacagcggctaaccaactgggtggcgtagacggtaaaaccgaagtcgttactatcgacggtaaaacctacaatgccagcaaagccgctggtcatgatttcaaagcacaaccagagctggcggaagcagccgctaaaaccaccgaaaacccgctgcagaaaattgatgccgcgctggcgcaggtggatgcgctgcgctctgatctgggtgcggtacaaaaccgtttcaactctgctatcaccaacctgggcaataccgtaaacaatctgtctgaagcgcgtagccgtatcgaagattccgactacgcgaccgaagtttccaacatgtctcgcgcgcagattctgcagcaggccggtacttccgttctggcgcaggctaaccaggtcccgcagaacgtgctgtctctgttagcgaaaggcactaaaacccgtggcaagctgtgtccgaagtgtctgaactgcaccgatctggacgtcgcactgggtcgtccgaaatgtactggtaacattccgtccgcggaagtctccatcctgcatgaagtgcgtccagtgacctccggctgttttccgattatgcatgatcgtactaaaatccgtcagctgccgaacctgctgcgtggttacgaacacattcgtctgtccacccataacgttatcaacgcggaaaaggcgccgggcggtccctataaaatcggtacctctggttcttgcccgaacgtgactaacggtaacggcttctttgcaaccatggcctgggcggtcccgaaaaacgacaacaacaagaccgcgaccaattccctgaccatcgaagtcccgtatatctgcaccgaaggtgaagatcaaatcacgatttggggcttccactccgacagcgagacacaaatggcgaaactgtacggtgacagcaaaccgcaaaaattcactagctccgctaacggtgttaccacccactacgtttcccagatcggtggtttcccaaaccagaccgaagatggtggtctgccgcagtccggtcgcatcgttgtagattatatggtgcagaaaagcggtaaaaccggtaccatcacctaccagcgtggcatcctgctgccgcagaaagtttggtgcgcttccggtcgtagcaaagtaatcaaaggttgatag

SEQ ID NO: 193 - DNA, 21 bp, Artificial Sequence
  FOR PRIMER
cggataacaattcccctctag

SEQ ID NO: 194 - DNA, 50 bp, Artificial Sequence
  REV PRIMER
cgaagtgagatttggttggagtagtggtcgctaacagagacagcacgttc

SEQ ID NO: 195 - DNA, 50 bp, Artificial Sequence
  FOR PRIMER
cccgcagaacgtgctgtctctgttagcgaccactaccccaaccaaatctc

SEQ ID NO: 196 - DNA, 20 bp, Artificial Sequence
  REV PRIMER
ctatttcacccaaattggac

SEQ ID NO: 197 - DNA, 51 bp, Artificial Sequence
  REV PRIMER
cacagcttgccacgggtttcagtgcctttcgctaacagagacagcacgttc

SEQ ID NO: 198 - DNA, 49 bp, Artificial Sequence
  FOR PRIMER
cccgcagaacgtgctgtctctgttagcgaaaggcactgaaacccgtggc

SEQ ID NO: 199 - DNA, 44 bp, Artificial Sequence
  REV PRIMER
gactagacgctcagctatcaacctttgattactttgctacgacc

SEQ ID NO: 200 - DNA, 51 bp, Artificial Sequence
  REV PRIMER
cacagcttaccgcgggtacgagtgcctttcgctaacagagacagcacgttc

SEQ ID NO: 201 - DNA, 32 bp, Artificial Sequence
  FOR PRIMER
cgggatccaaaggcactcgtacccgcggtaag

SEQ ID NO: 202 - DNA, 44 bp, Artificial Sequence
  REV PRIMER
gactagacgctcagctatcagcccttaatgaccttggaacggcc

SEQ ID NO: 203 - DNA, 52 bp, Artificial Sequence
  REV PRIMER
gcatagttttcctctggtctgtgttcctttcgctaacagagacagcacgttc

SEQ ID NO: 204 - DNA, 20 bp, Artificial Sequence
  FOR PRIMER
aaaggaacacagaccagagg

SEQ ID NO: 205 - DNA, 26 bp, Artificial Sequence
  REV PRIMER
ctactacccttttattaccttgctcc

SEQ ID NO: 206 - DNA, 51 bp, Artificial Sequence
  REV PRIMER
cacagcttgccacgggttttagtgcctttcgctaacagagacagcacgttc

SEQ ID NO: 207 - DNA, 21 bp, Artificial Sequence
  FOR PRIMER
aaaggcactaaaacccgtggc

SEQ ID NO: 208 - DNA, 44 bp, Artificial Sequence; identical to SEQ ID NO: 199
  REV PRIMER

SEQ ID NO: 209 - protein, 800 aa, Artificial Sequence
  STF2.HA1-1 (MAL)
MAQVINTNSLSLLTQNNLNKSQSALGTAIERLSSGLRINSAKDDAAGQAIANRFTANIKGLTQASRNANDGISIAQTTEGALNEINNNLQRVRELAVQSANSTNSQSDLDSIQAEITQRLNEIDRVSGQTQFNGVKVLAQDNTLTIQVGANDGETIDIDLKQINSQTLGLDSLNVQKAYDVKDTAVTTKAYANNGTTLDVSGLDDAAIKAATGGTNGTASVTGGAVKFDADNNKYFVTIGGFTGADAAKNGDYEVNVATDGTVTLAAGATKTTMPAGATTKTEVQELKDTPAVVSADAKNALIAGGVDATDANGAELVKMSYTDKNGKTIEGGYALKAGDKYYAADYDEATGAIKAKTTSYTAADGTTKTAANQLGGVDGKTEVVTIDGKTYNASKAAGHDFKAQPELAEAAAKTTENPLQKIDAALAQVDALRSDLGAVQNRFNSAITNLGNTVNNLSEARSRIEDSDYATEVSNMSRAQILQQAGTSVLAQANQVPQNVLSLLATTTPTKSHFANLKGTETRGKLCPKCLNCTDLDVALGRPKCTGNIPSARVSILHEVRPVTSGCFPIMHDRTKIRQLPNLLRGYEHIRLSTHNVINAENAPGGSYKIGTSGSCPNVTNGNGFFATMAWAVPKNDNNKTATNSLTIEVPYICTEGEDQITVWGFHSDNEAQMAKLYGDSKPQKFTSSANGVTTHYVSQIGGFPNQTEDGGLPQSGRIVVDYMVQKSGKTGTITYQRGILLPQKVWCASGRSKVIKGSLPLIGEADCLHEKYGGLNKSKPYYTGEHAKAIGNCPIWVK

SEQ ID NO: 210 - protein, 747 aa, Artificial Sequence
  STF2.HA1-2 (MAL)
MAQVINTNSLSLLTQNNLNKSQSALGTAIERLSSGLRINSAKDDAAGQAIANRFTANIKGLTQASRNANDGISIAQTTEGALNEINNNLQRVRELAVQSANSTNSQSDLDSIQAEITQRLNEIDRVSGQTQFNGVKVLAQDNTLTIQVGANDGETIDIDLKQINSQTLGLDSLNVQKAYDVKDTAVTTKAYANNGTTLDVSGLDDAAIKAATGGTNGTASVTGGAVKFDADNNKYFVTIGGFTGADAAKNGDYEVNVATDGTVTLAAGATKTTMPAGATTKTEVQELKDTPAVVSADAKNALIAGGVDATDANGAELVKMSYTDKNGKTIEGGYALKAGDKYYAADYDEATGAIKAKTTSYTAADGTTKTAANQLGGVDGKTEVVTIDGKTYNASKAAGHDFKAQPELAEAAAKTTENPLQKIDAALAQVDALRSDLGAVQNRFNSAITNLGNTVNNLSEARSRIEDSDYATEVSNMSRAQILQQAGTSVLAQANQVPQNVLSLLAKGTETRGKLCPKCLNCTDLDVALGRPKCTGNIPSARVSILHEVRPVTSGCFPIMHDRTKIRQLPNLLRGYEHIRLSTHNVINAENAPGGSYKIGTSGSCPNVTNGNGFFATMAWAVPKNDNNKTATNSLTIEVPYICTEGEDQITVWGFHSDNEAQMAKLYGDSKPQKFTSSANGVTTHYVSQIGGFPNQTEDGGLPQSGRIVVDYMVQKSGKTGTITYQRGILLPQKVWCASGRSKVIKG

SEQ ID NO: 211 - protein, 746 aa, Artificial Sequence
  STF2.HA1-2 (SH)
MAQVINTNSLSLLTQNNLNKSQSALGTAIERLSSGLRINSAKDDAAGQAIANRFTANIKGLTQASRNANDGISIAQTTEGALNEINNNLQRVRELAVQSANSTNSQSDLDSIQAEITQRLNEIDRVSGQTQFNGVKVLAQDNTLTIQVGANDGETIDIDLKQINSQTLGLDSLNVQKAYDVKDTAVTTKAYANNGTTLDVSGLDDAAIKAATGGTNGTASVTGGAVKFDADNNKYFVTIGGFTGADAAKNGDYEVNVATDGTVTLAAGATKTTMPAGATTKTEVQELKDTPAVVSADAKNALIAGGVDATDANGAELVKMSYTDKNGKTIEGGYALKAGDKYYAADYDEATGAIKAKTTSYTAADGTTKTAANQLGGVDGKTEVVTIDGKTYNASKAAGHDFKAQPELAEAAAKTTENPLQKIDAALAQVDALRSDLGAVQNRFNSAITNLGNTVNNLSEARSRIEDSDYATEVSNMSRAQILQQAGTSVLAQANQVPQNVLSLLAKGTRTRGKLCPDCLNCTDLDVALGRPMCVGTTPSAKASILHEVRPVTSGCFPIMHDRTKIRQLPNLLRGYENIRLSTQNVIDAEKALGGPYRLGTSGSCPNATSKSGFFATMAWAVPKDNNKNATNPLTVEVPYICTEGEDQITVWGFHSDDKTQMKNLYGDSNPQKFTSSANGVTTHYVSQIGGFPDQTEDGGLPQSGRIVVDYMVQKPGKTGTIVYQRGVLLPQKVWCASGRSKVIKG

SEQ ID NO: 212 - protein, 1518 aa, Artificial Sequence
  STF2
ATGGCACAAGTAATCAACACTAACAGTCTGTCGCTGCTGACCCAGAATAACCTGAACAAATCCCAGTCCGCACTGGGCACCGCTATCGAGCGTCTGTCTTCTGGTCTGCGTATCAACAGCGCGAAAGACGATGCGGCAGGTCAGGCGATTGCTAACCGTTTCACCGCGAACATCAAAGGTCTGACTCAGGCTTCCCGTAACGCTAACGACGGTATCTCCATTGCGCAGACCACTGAAGGCGCGCTGAACGAAATCAACAACAACCTGCAGCGTGTGCGTGAACTGGCGGTTCAGTCTGCTAACAGCACCAACTCCCAGTCTGACCTCGACTCCATCCAGGCTGAAATCACCCAGCGCCTGAACGAAATCGACCGTGTATCCGGCCAGACTCAGTTCAACGGCGTGAAAGTCCTGGCGCAGGACAACACCCTGACCATCCAGGTTGGCGCCAACGACGGTGAAACTATCGATATCGATCTGAAGCAGATCAACTCTCAGACCCTGGGTCTGGACTCACTGAACGTGCAGAAAGCGTATGATGTGAAAGATACAGCAGTAACAACGAAAGCTTATGCCAATAATGGTACTACACTGGATGTATCGGGTCTTGATGATGCAGCTATTAAAGCGGCTACGGGTGGTACGAATGGTACGGCTTCTGTAACCGGTGGTGCGGTTAAATTTGACGCAGATAATAACAAGTACTTTGTTACTATTGGTGGCTTTACTGGTGCTGATGCCGCCAAAAATGGCGATTATGAAGTTAACGTTGCTACTGACGGTACAGTAACCCTTGCGGCTGGCGCAACTAAAACCACAATGCCTGCTGGTGCGACAACTAAAACAGAAGTACAGGAGTTAAAAGATACACCGGCAGTTGTTTCAGCAGATGCTAAAAATGCCTTAATTGCTGGCGGCGTTGACGCTACCGATGCTAATGGCGCTGAGTTGGTCAAAATGTCTTATACCGATAAAAATGGTAAGACAATTGAAGGCGGTTATGCGCTTAAAGCTGGCGATAAGTATTACGCCGCAGATTACGATGAAGCGACAGGAGCAATTAAAGCTAAAACTACAAGTTATACTGCTGCTGACGGCACTACCAAAACAGCGGCTAACCAACTGGGTGGCGTAGACGGTAAAACCGAAGTCGTTACTATCGACGGTAAAACCTACAATGCCAGCAAAGCCGCTGGTCATGATTTCAAAGCACAACCAGAGCTGGCGGAAGCAGCCGCTAAAACCACCGAAAACCCGCTGCAGAAAATTGATGCCGCGCTGGCGCAGGTGGATGCGCTGCGCTCTGATCTGGGTGCGGTACAAAACCGTTTCAACTCTGCTATCACCAACCTGGGCAATACCGTAAACAATCTGTCTGAAGCGCGTAGCCGTATCGAAGATTCCGACTACGCGACCGAAGTTTCCAACATGTCTCGCGCGCAGATTCTGCAGCAGGCCGGTACTTCCGTTCTGGCGCAGGCTAACCAGGTCCCGCAGAACGTGCTGTCTCTGTTACGT

SEQ ID NO: 213 - protein, 583 aa, Influenza B/Yamagata/16/18 HA
MKAIIVLLMVVTSNADRICTGITSSNSPHVVKTATQGEVNVTGVIPLTTTPTKSHFANLKGTKTRGKLCPNCLNCTDLDVALGRPMCMGTIPSAKASILHEVRPVTSGCFPIMHDRTKIRQLPNLLRGYENIRLSTHNVINAERAPGGPYRLGTSGSCPNVTSRNGFFATMAWAVPRDNKTATNPLTVEVPYICTKGEDQITVWGFHSDDKTQMKNLYGDSNPQKFTSSANGVTTHYVSQIGDFPNQTEDGGLPQSGRIVVDYMVQKPGKTGTIVYQRGVLLPQKVWCASGRSKVIKGSLPLIGEADCLHEKYGGLNKSKPYYTGEHAKAIGNCPIWVKTPLKLANGTKYRPPAKLLKERGFFGAIAGFLEGGWEGMIAGWHGYTSHGAHGVAVAADLKSTQEAINKITKNLNSLSELEVKNLQRLSGAMDELHNEILELDEKVDDLRADTISSQIELAVLLSNEGIINSEDEHLLALERKLKKMLGPSAVDIGNGCFETKHKCNQTCLDRIAAGTFNAGEFSLPTFDSLNITAASLNDDGLDNHTILLYYSTAASSLAVTLMIAIFIVYMVSRDNVSCSICL

SEQ ID NO: 214 - protein, 6 aa, Artificial Sequence
  PR/8 HA Peptide
THSVNL

SEQ ID NO: 215 - protein, 6 aa, Artificial Sequence
  PR/8 HA Peptide
SHNGKL

SEQ ID NO: 216 - protein, 4 aa, Artificial Sequence
  PR/8 HA Peptide
CRLK

SEQ ID NO: 217 - protein, 4 aa, Artificial Sequence
  PR/8 HA Peptide
PYQN

SEQ ID NO: 218 - protein, 4 aa, Artificial Sequence
  PR/8 HA Peptide
PKYV

SEQ ID NO: 219 - protein, 4 aa, Artificial Sequence
  PR/8 HA Peptide
RSAK

SEQ ID NO: 220 - protein, 6 aa, Artificial Sequence
  PR/8 HA Peptide
NASMHE

SEQ ID NO: 221 - protein, 6 aa, Artificial Sequence
  PR/8 HA Peptide
APLQLG

SEQ ID NO: 222 - protein, 5 aa, Artificial Sequence
  PR/8 HA Peptide
GIITS

SEQ ID NO: 223 - protein, 4 aa, Artificial Sequence
  PR/8 HA Peptide
CNTK

SEQ ID NO: 224 - protein, 6 aa, Artificial Sequence
  PR/8 HA Peptide
SYIVET

SEQ ID NO: 225 - protein, 8 aa, Artificial Sequence
  PR/8 HA Peptide
NIAGWLLG

SEQ ID NO: 226 - protein, 5 aa, Artificial Sequence
  PR/8 HA Peptide
PGDFI

SEQ ID NO: 227 - protein, 8 aa, Artificial Sequence
  PR/8 HA Peptide
NSENGICY

SEQ ID NO: 228 - protein, 8 aa, Artificial Sequence
  PR/8 HA Peptide
AFALSRGF

SEQ ID NO: 229 - protein, 7 aa, Artificial Sequence
  PR/8 HA Peptide
AFALSRG

SEQ ID NO: 230 - protein, 6 aa, Artificial Sequence
  VN04 HA peptide
THAQDI

SEQ ID NO: 231 - protein, 6 aa, Artificial Sequence
  VN04 HA peptide
EKKHNG

SEQ ID NO: 232 - protein, 6 aa, Artificial Sequence
  VN04 HA peptide
KLCDLD

SEQ ID NO: 233 - protein, 4 aa, Artificial Sequence
  VN04 HA peptide
KSNR

SEQ ID NO: 234 - protein, 4 aa, Artificial Sequence
  VN04 HA peptide
PKYV

SEQ ID NO: 235 - protein, 6 aa, Artificial Sequence
  VN04 HA peptide
LVLATG

SEQ ID NO: 236 - protein, 5 aa, Artificial Sequence
  VN04 HA peptide
KPLIL

SEQ ID NO: 237 - protein, 5 aa, Artificial Sequence
  VN04 HA peptide
TIMKS

SEQ ID NO: 238 - protein, 5 aa, Artificial Sequence
  VN04 HA peptide
YGNCN

SEQ ID NO: 239 - protein, 6 aa, Artificial Sequence
  VN04 HA peptide
SYIVEK

SEQ ID NO: 240 - protein, 5 aa, Artificial Sequence
  VN04 HA peptide
PGDFN

SEQ ID NO: 241 - protein, 4 aa, Artificial Sequence
  VN04 HA peptide
KGDS

SEQ ID NO: 242 - protein, 8 aa, Artificial Sequence
  VN04 HA peptide
EYAYKIVK

SEQ ID NO: 243 - protein, 6 aa, Artificial Sequence
  IND05 HA peptide
THAQDI

SEQ ID NO: 244 - protein, 6 aa, Artificial Sequence
  IND05 HA peptide
EKTHNG

SEQ ID NO: 245 - protein, 6 aa, Artificial Sequence
  IND05 HA peptide
KLCDLD

SEQ ID NO: 246 - protein, 4 aa, Artificial Sequence
  IND05 HA peptide
KSNR

SEQ ID NO: 247 - protein, 4 aa, Artificial Sequence
  IND05 HA peptide
PKYV

SEQ ID NO: 248 - protein, 6 aa, Artificial Sequence
  IND05 HA peptide
LVLATG

SEQ ID NO: 249 - protein, 5 aa, Artificial Sequence
  IND05 HA peptide
KPLIL

SEQ ID NO: 250 - protein, 5 aa, Artificial Sequence
  IND05 HA peptide
AIMKS

SEQ ID NO: 251 - protein, 5 aa, Artificial Sequence
  IND05 HA peptide
YGNCN

SEQ ID NO: 252 - protein, 6 aa, Artificial Sequence
  IND05 HA peptide
SYIVEK

SEQ ID NO: 253 - protein, 5 aa, Artificial Sequence
  IND05 HA peptide
PGSFN

SEQ ID NO: 254 - protein, 8 aa, Artificial Sequence
  IND05 HA peptide
EYAYKIVK

SEQ ID NO: 255 - protein, 9 aa, Artificial Sequence
  New Caledonia HA peptide
THSVNLLED

SEQ ID NO: 256 - protein, 6 aa, Artificial Sequence
  New Caledonia HA peptide
SHNGKL

SEQ ID NO: 257 - protein, 6 aa, Artificial Sequence
  New Caledonia HA peptide
APLQLG

SEQ ID NO: 258 - protein, 4 aa, Artificial Sequence
  New Caledonia HA peptide
RSAK

SEQ ID NO: 259 - protein, 4 aa, Artificial Sequence
  New Caledonia HA peptide
PKYV

SEQ ID NO: 260 - protein, 6 aa, Artificial Sequence
  New Caledonia HA peptide
LRMVTG

SEQ ID NO: 261 - protein, 12 aa, Artificial Sequence
  New Caledonia HA peptide
SHNGKLCLLKGI

SEQ ID NO: 262 - protein, 6 aa, Artificial Sequence
  New Caledonia HA peptide
SGIITS

SEQ ID NO: 263 - protein, 9 aa, Artificial Sequence
  New Caledonia HA peptide
NAPMDECDA

SEQ ID NO: 264 - protein, 6 aa, Artificial Sequence
  New Caledonia HA peptide
SYIVET

SEQ ID NO: 265 - protein, 5 aa, Artificial Sequence
  New Caledonia HA peptide
PGYFA

SEQ ID NO: 266 - protein, 9 aa, Artificial Sequence
  New Caledonia HA peptide
YAFALSRGF

SEQ ID NO: 267 - protein, 5 aa, Artificial Sequence
  A/Wisconsin/67/2005 HA Peptide
TNATE

SEQ ID NO: 268 - protein, 5 aa, Artificial Sequence
  A/Wisconsin/67/2005 HA Peptide
PRYVK

SEQ ID NO: 269 - protein, 5 aa, Artificial Sequence
  A/Wisconsin/67/2005 HA Peptide
PFQNV

SEQ ID NO: 270 - protein, 6 aa, Artificial Sequence
  A/Wisconsin/67/2005 HA Peptide
QILDGE

SEQ ID NO: 271 - protein, 5 aa, Artificial Sequence
  A/Wisconsin/67/2005 HA Peptide
GGICD

SEQ ID NO: 272 - protein, 6 aa, Artificial Sequence
  A/Wisconsin/67/2005 HA Peptide
SSIMRS

SEQ ID NO: 273 - protein, 5 aa, Artificial Sequence
  A/Wisconsin/67/2005 HA Peptide
APIGK

SEQ ID NO: 274 - protein, 5 aa, Artificial Sequence
  A/Wisconsin/67/2005 HA Peptide
LFVER

SEQ ID NO: 275 - protein, 8 aa, Artificial Sequence
  A/Wisconsin/67/2005 HA Peptide
TLIDALLG

SEQ ID NO: 276 - protein, 6 aa, Artificial Sequence
  A/Wisconsin/67/2005 HA Peptide
RGYFKI

SEQ ID NO: 277 - protein, 8 aa, Artificial Sequence
  PR/8 HA1-3mut peptide
NSENEICY

SEQ ID NO: 278 - protein, 8 aa, Artificial Sequence
  PR/8 HA1-3mut peptide
KEELREQL

SEQ ID NO: 279 - protein, 6 aa, Artificial Sequence
  B/Lee/40 HA1-1 peptide
TTTPTK

SEQ ID NO: 280 - protein, 6 aa, Artificial Sequence
  B/Lee/40 HA1-1 peptide
CPIWVK

SEQ ID NO: 281 - protein, 6 aa, Artificial Sequence
  B/Lee/40 HA1-2 peptide
KGTQTR

SEQ ID NO: 282 - protein, 6 aa, Artificial Sequence
  B/Lee/40 HA1-2 peptide
SKVIKG

SEQ ID NO: 283 - protein, 6 aa, Artificial Sequence
  A/Aichi/2/68 HA1-1 peptide
QSSSTG

SEQ ID NO: 284 - protein, 6 aa, Artificial Sequence
  A/Aichi/2/68 HA1-1 peptide
CPKYVK

SEQ ID NO: 285 - protein, 6 aa, Artificial Sequence
  A/Aichi/2/68 HA1-2 peptide
HRILDG

SEQ ID NO: 286 - protein, 6 aa, Artificial Sequence
  A/Aichi/2/68 HA1-2 peptide
SIMRSD

SEQ ID NO: 287 - protein, 6 aa, Artificial Sequence
  B/Malaysia/2506/2004 HA1-1 peptide
TTTPTK

SEQ ID NO: 288 - protein, 6 aa, Artificial Sequence
  B/Malaysia/2506/2004 HA1-1 peptide
CPIWVK

SEQ ID NO: 289 - protein, 6 aa, Artificial Sequence
  B/Malaysia/2506/2004 HA1-2 peptide
KGTETR

SEQ ID NO: 290 - protein, 6 aa, Artificial Sequence
  B/Malaysia/2506/2004 HA1-2 peptide
SKVIKG

SEQ ID NO: 291 - protein, 6 aa, Artificial Sequence
  B/Ohio/1/2005 HA1-1 peptide
TTTPTK

SEQ ID NO: 292 - protein, 6 aa, Artificial Sequence
  B/Ohio/1/2005 HA1-1 peptide
CPIWVK

SEQ ID NO: 293 - protein, 6 aa, Artificial Sequence
  B/Ohio/1/2005 HA1-2 peptide
KGTKTR

SEQ ID NO: 294 - protein, 6 aa, Artificial Sequence
  B/Ohio/1/2005 HA1-2 peptide
SKVIKG

SEQ ID NO: 295 - protein, 6 aa, Artificial Sequence
  B/Shanghai/361/2002 HA1-1 peptide
TTTPIK

SEQ ID NO: 296 - protein, 6 aa, Artificial Sequence
  B/Shanghai/361/2002 HA1-1 peptide
CPIWVK

SEQ ID NO: 297 - protein, 6 aa, Artificial Sequence
  B/Shanghai/361/2002 HA1-2 peptide
KGTRTR

SEQ ID NO: 298 - protein, 6 aa, Artificial Sequence
  B/Shanghai/361/2002 HA1-2 peptide
SKVIKG

SEQ ID NO: 299 - protein, 4 aa, Artificial Sequence
  B/Lee/40 HA peptide
TGVI

SEQ ID NO: 300 - protein, 4 aa, Artificial Sequence
  B/Lee/40 HA peptide
TTTP

SEQ ID NO: 301 - protein, 4 aa, Artificial Sequence
  B/Lee/40 HA peptide
PIWV

SEQ ID NO: 302 - protein, 5 aa, Artificial Sequence
  B/Lee/40 HA peptide
PYYTG

SEQ ID NO: 303 - protein, 5 aa, Artificial Sequence
  B/Lee/40 HA peptide
DCLHE

SEQ ID NO: 304 - protein, 5 aa, Artificial Sequence
  B/Lee/40 HA peptide
YGGLN

SEQ ID NO: 305 - protein, 5 aa, Artificial Sequence
  B/Lee/40 HA peptide
KAIGN

SEQ ID NO: 306 - protein, 5 aa, Artificial Sequence
  B/Lee/40 HA peptide
TQTRG

SEQ ID NO: 307 - protein, 5 aa, Artificial Sequence
  B/Lee/40 HA peptide
KVIKG

SEQ ID NO: 308 - protein, 5 aa, Artificial Sequence
  B/Lee/40 HA peptide
DCLHE

SEQ ID NO: 309 - protein, 6 aa, Artificial Sequence
  B/Lee/40 HA peptide
SILHEV

SEQ ID NO: 310 - DNA, 18 bp, Artificial Sequence
  STF2
gtgctgagcctgttacgt

SEQ ID NO: 311 - protein, 7 aa, Artificial Sequence
  linker
SGSGSGS

SEQ ID NO: 312 - protein, 506 aa, S. typhimurium
MAQVINTNSLSLLTQNNLNKSQSALGTAIERLSSGLRINSAKDDAAGQAIANRFTANIKGLTQASRNANDGISIAQTTEGALNEINNNLQRVRELAVQSANSTNSQSDLDSIQAEITQRLNEIDRVSGQTQFNGVKVLAQDNTLTIQVGANDGETIDIDLKQINSQTLGLDSLNVQKAYDVKDTAVTTKAYANNGTTLDVSGLDDAAIKAATGGTNGTASVTGGAVKFDADNNKYFVTIGGFTGADAAKNGDYEVNVATDGTVTLAAGATKTTMPAGATTKTEVQELKDTPAVVSADAKNALIAGGVDATDANGAELVKMSYTDKNGKTIEGGYALKAGDKYYAADYDEATGAIKAKTTSYTAADGTTKTAANQLGGVDGKTEVVTIDGKTYNASKAAGHDFKAQPELAEAAAKTTENPLQKIDAALAQVDALRSDLGAVQNRFNSAITNLGNTVNNLSEARSRIEDSDYATEVSNMSRAQILQQAGTSVLAQANQVPQNVLSLLR

SEQ ID NO: 313 - protein, 277 aa, Artificial Sequence
  STF2delta
MAQVINTNSLSLLTQNNLNKSQSALGTAIERLSSGLRINSAKDDAAGQAIANRFTANIKGLTQASRNANDGISIAQTTEGALNEINNNLQRVRELAVQSANSTNSQSDLDSIQAEITQRLNEIDRVSGQTQFNGVKVLAQDNTLTIQVGANDGETIDIDLKQINSQTLGLDSLNVHGAPVDPASPWTENPLQKIDAALAQVDALRSDLGAVQNRFNSAITNLGNTVNNLSEARSRIEDSDYATEVSNMSRAQILQQAGTSVLAQANQVPQNVLSLLR

SEQ ID NO: 314 - DNA, 831 bp, Artificial Sequence
  STF2delta
atggcacaagtaatcaacactaacagtctgtcgctgctgacccagaataacctgaacaaatcccagtccgcactgggcaccgctatcgagcgtctgtcttctggtctgcgtatcaacagcgcgaaagacgatgcggcaggtcaggcgattgctaaccgtttcaccgcgaacatcaaaggtctgactcaggcttcccgtaacgctaacgacggtatctccattgcgcagaccactgaaggcgcgctgaacgaaatcaacaacaacctgcagcgtgtgcgtgaactggcggttcagtctgctaacagcaccaactcccagtctgacctcgactccatccaggctgaaatcacccagcgcctgaacgaaatcgaccgtgtatccggccagactcagttcaacggcgtgaaagtcctggcgcaggacaacaccctgaccatccaggttggcgccaacgacggtgaaactatcgatatcgatctgaagcagatcaactctcagaccctgggtctggactcactgaacgtgcatggagcgccggtggatcctgctagcccatggaccgaaaacccgctgcagaaaattgatgccgcgctggcgcaggtggatgcgctgcgctctgatctgggtgcggtacaaaaccgtttcaactctgctatcaccaacctgggcaataccgtaaacaatctgtctgaagcgcgtagccgtatcgaagattccgactacgcgaccgaagtttccaacatgtctcgcgcgcagattttgcagcaggccggtacttccgttctggcgcaggctaaccaggtcccgcagaacgtgctgtctctgttacgt

SEQ ID NO: 315 - DNA, 1518 bp, S. typhimurium; identical to SEQ ID NO: 178

SEQ ID NO: 316 - DNA, 2763 bp, Artificial Sequence
  STF2.OVA
atggcacaagtaatcaacactaacagtctgtcgctgctgacccagaataacctgaacaaatcccagtccgcactgggcaccgctatcgagcgtctgtcttctggtctgcgtatcaacagcgcgaaagacgatgcggcaggtcaggcgattgctaaccgtttcaccgcgaacatcaaaggtctgactcaggcttcccgtaacgctaacgacggtatctccattgcgcagaccactgaaggcgcgctgaacgaaatcaacaacaacctgcagcgtgtgcgtgaactggcggttcagtctgctaacagcaccaactcccagtctgacctcgactccatccaggctgaaatcacccagcgcctgaacgaaatcgaccgtgtatccggccagactcagttcaacggcgtgaaagtcctggcgcaggacaacaccctgaccatccaggttggcgccaacgacggtgaaactatcgatatcgatctgaagcagatcaactctcagaccctgggtctggactcactgaacgtgcagaaagcgtatgatgtgaaagatacagcagtaacaacgaaagcttatgccaataatggtactacactggatgtatcgggtcttgatgatgcagctattaaagcggctacgggtggtacgaatggtacggcttctgtaaccggtggtgcggttaaatttgacgcagataataacaagtactttgttactattggtggctttactggtgctgatgccgccaaaaatggcgattatgaagttaacgttgctactgacggtacagtaacccttgcggctggcgcaactaaaaccacaatgcctgctggtgcgacaactaaaacagaagtacaggagttaaaagatacaccggcagttgtttcagcagatgctaaaaatgccttaattgctggcggcgttgacgctaccgatgctaatggcgctgagttggtcaaaatgtcttataccgataaaaatggtaagacaattgaaggcggttatgcgcttaaagctggcgataagtattacgccgcagattacgatgaagcgacaggagcaattaaagctaaaaccacaagttatactgctgctgacggcactaccaaaacagcggctaaccaactgggtggcgtagacggtaaaaccgaagtcgttactatcgacggtaaaacctacaatgccagcaaagccgctggtcatgatttcaaagcacaaccagagctggcggaagcagccgctaaaaccaccgaaaacccgctgcagaaaattgatgccgcgctggcgcaggtggatgcgctgcgctctgatctgggtgcggtacaaaaccgtttcaactctgctatcaccaacctgggcaataccgtaaacaatctgtctgaagcgcgtagccgtatcgaagattccgactacgcgaccgaagtttccaacatgtctcgcgcgcagattttgcagcaggccggtacttccgttctggcgcaggctaaccaggtcccgcagaacgtgctgtctctgttacgtctcgagggctccatcggcgcagcaagcatggaattttgttttgatgtattcaaggagctcaaagtccaccatgccaatgagaacatcttctactgccccattgccatcatgtcagctctagccatggtatacctgggtgcaaaagacagcaccaggacacaaataaataaggttgttcgctttgataaacttccaggattcggagacagtattgaagctcagtgtggcacatctgtaaacgttcactcttcacttagagacatcctcaaccaaatcaccaaaccaaatgatgtttattcgttcagccttgccagtagactttatgctgaagagagatacccaatcctgccagaatacttgcagtgtgtgaaggaactgtatagaggaggcttggaacctatcaactttcaaacagctgcagatcaagccagagagctcatcaattcctgggtagaaagtcagacaaatggaattatcagaaatgtccttcagccaagctccgtggattctcaaactgcaatggttctggttaatgccattgtcttcaaaggactgtgggagaaagcatttaaggatgaagacacacaagcaatgcctttcagagtgactgagcaagaaagcaaacctgtgcagatgatgtaccagattggtttatttagagtggcatcaatggcttctgagaaaatgaagatcctggagcttccatttgccagtgggacaatgagcatgttggtgctgttgcctgatgaagtctcaggccttgagcagcttgagagtataatcaactttgaaaaactgactgaatggaccagttctaatgttatggaagagaggaagatcaaagtgtacttacctcgcatgaagatggaggaaaaatacaacctcacatctgtcttaatggctatgggcattactgacgtgtttagctcttcagccaatctgtctggcatctcctcagcagagagcctgaagatatctcaagctgtccatgcagcacatgcagaaatcaatgaagcaggcagagaggtggtagggtcagcagaggctggagtggatgctgcaagcgtctctgaagaatttagggctgaccatccattcctcttctgtatcaagcacatcgcaaccaacgccgttctcttctttggcagatgtgtttccccttcgaagcttgaaggtaagcctatccctaaccctctcctcggtctcgattctacgcgtaccggtcatcatcaccatcaccattga

SEQ ID NO: 317 - DNA, 38 bp, Artificial Sequence
  primer STF28BGF-1
ctcgggagatctgcacaagtaatcaacactaacagtct

SEQ ID NO: 318 - DNA, 41 bp, Artificial Sequence
  primer STF28MCR-1
ccatgggctagcaggatccaccggcgctccctgcacgttca

SEQ ID NO: 319 - DNA, 42 bp, Artificial Sequence
  primer STF28MCF-2
ggagcgccggtggatcctgctagcccatggaccgaaaacccg

SEQ ID NO: 320 - DNA, 84 bp, Artificial Sequence
  primer STF28ECR-2
tctgcagaattcacgtaacagagacagcacgttctgcgggacgtcccgcagaacgtgctgtctctgttacgtgaattctgcaga

SEQ ID NO: 321 - DNA, 37 bp, Artificial Sequence
  primer 3'Forward1
actgagtgcatatggcacaagtaatcaacactaacag

SEQ ID NO: 322 - DNA, 55 bp, Artificial Sequence
  primer 3'Reverse1
gactgactgctcagcctattagcagagcggccgccactgtgctggatatctagag

SEQ ID NO: 323 - DNA, 44 bp, Artificial Sequence
  primer 5'Forward2
agtcaggccatatgtgcgcacaagtaatcaacactaacagtctg

SEQ ID NO: 324 - DNA, 59 bp, Artificial Sequence
  primer 5"Reverse2
gactgactgctcagcctattaacgtaacagagacagcacgttctgcgggacctggttag

SEQ ID NO: 325 - DNA, 870 bp, Artificial Sequence
  STF2delta.3'Cys
atggcacaagtaatcaacactaacagtctgtcgctgctgacccagaataacctgaacaaatcccagtccgcactgggcaccgctatcgagcgtctgtcttctggtctgcgtatcaacagcgcgaaagacgatgcggcaggtcaggcgattgctaaccgtttcaccgcgaacatcaaaggtctgactcaggcttcccgtaacgctaacgacggtatctccattgcgcagaccactgaaggcgcgctgaacgaaatcaacaacaacctgcagcgtgtgcgtgaactggcggttcagtctgctaacagcaccaactcccagtctgacctcgactccatccaggctgaaatcacccagcgcctgaacgaaatcgaccgtgtatccggccagactcagttcaacggcgtgaaagtcctggcgcaggacaacaccctgaccatccaggttggcgccaacgacggtgaaactatcgatatcgatctgaagcagatcaactctcagaccctgggtctggactcactgaacgtgcatggagcgccggtggatcctgctagcccatggaccgaaaacccgctgcagaaaattgatgccgcgctggcgcaggtggatgcgctgcgctctgatctgggtgcggtacaaaaccgtttcaactctgctatcaccaacctgggcaataccgtaaacaatctgtctgaagcgcgtagccgtatcgaagattccgactacgcgaccgaagtttccaacatgtctcgcgcgcagattttgcagcaggccggtacttccgttctggcgcaggctaaccaggtcccgcagaacgtgctgtctctgttacgtgaattctctagatatccagcacagtggcggccgctctgc

SEQ ID NO: 326 - DNA, 834 bp, Artificial Sequence
  5'Cys.STF2delta
atgtgcgcacaagtaatcaacactaacagtctgtcgctgctgacccagaataacctgaacaaatcccagtccgcactgggcaccgctatcgagcgtctgtcttctggtctgcgtatcaacagcgcgaaagacgatgcggcaggtcaggcgattgctaaccgtttcaccgcgaacatcaaaggtctgactcaggcttcccgtaacgctaacgacggtatctccattgcgcagaccactgaaggcgcgctgaacgaaatcaacaacaacctgcagcgtgtgcgtgaactggcggttcagtctgctaacagcaccaactcccagtctgacctcgactccatccaggctgaaatcacccagcgcctgaacgaaatcgaccgtgtatccggccagactcagttcaacggcgtgaaagtcctggcgcaggacaacaccctgaccatccaggttggcgccaacgacggtgaaactatcgatatcgatctgaagcagatcaactctcagaccctgggtctggactcactgaacgtgcatggagcgccggtggatcctgctagcccatggaccgaaaacccgctgcagaaaattgatgccgcgctggcgcaggtggatgcgctgcgctctgatctgggtgcggtacaaaaccgtttcaactctgctatcaccaacctgggcaataccgtaaacaatctgtctgaagcgcgtagccgtatcgaagattccgactacgcgaccgaagtttccaacatgtctcgcgcgcagattttgcagcaggccggtacttccgttctggcgcaggctaaccaggtcccgcagaacgtgctgtctctgttacgt

SEQ ID NO: 327 - DNA, 37 bp, Artificial Sequence; identical to SEQ ID NO: 321
  Primer HingeForward1

SEQ ID NO: 328 - DNA, 31 bp, Artificial Sequence
  Primer HingeReverse3
ggtccatgggcaagcaggatccaccggcgct

SEQ ID NO: 329 - DNA, 31 bp, Artificial Sequence
  Primer HingeForward2
agcgccggtggatcctgcttgcccatggacc

SEQ ID NO: 330 - DNA, 59 bp, Artificial Sequence; identical to SEQ ID NO: 324
  Primer HingeReverse4

SEQ ID NO: 331 - DNA, 831 bp, Artificial Sequence
  STF2delta.HingeCys
atggcacaagtaatcaacactaacagtctgtcgctgctgacccagaataacctgaacaaatcccagtccgcactgggcaccgctatcgagcgtctgtcttctggtctgcgtatcaacagcgcgaaagacgatgcggcaggtcaggcgattgctaaccgtttcaccgcgaacatcaaaggtctgactcaggcttcccgtaacgctaacgacggtatctccattgcgcagaccactgaaggcgcgctgaacgaaatcaacaacaacctgcagcgtgtgcgtgaactggcggttcagtctgctaacagcaccaactcccagtctgacctcgactccatccaggctgaaatcacccagcgcctgaacgaaatcgaccgtgtatccggccagactcagttcaacggcgtgaaagtcctggcgcaggacaacaccctgaccatccaggttggcgccaacgacggtgaaactatcgatatcgatctgaagcagatcaactctcagaccctgggtctggactcactgaacgtgcatggagcgccggtggatcctgcttgcccatggaccgaaaacccgctgcagaaaattgatgccgcgctggcgcaggtggatgcgctgcgctctgatctgggtgcggtacaaaaccgtttcaactctgctatcaccaacctgggcaataccgtaaacaatctgtctgaagcgcgtagccgtatcgaagattccgactacgcgaccgaagtttccaacatgtctcgcgcgcagattttgcagcaggccggtacttccgttctggcgcaggctaaccaggtcccgcagaacgtgctgtctctgttacgt

SEQ ID NO: 332 - protein, 290 aa, Artificial Sequence
  STF2delta.3'Cys
MAQVINTNSLSLLTQNNLNKSQSALGTAIERLSSGLRINSAKDDAAGQAIANRFTANIKGLTQASRNANDGISIAQTTEGALNEINNNLQRVRELAVQSANSTNSQSDLDSIQAEITQRLNEIDRVSGQTQFNGVKVLAQDNTLTIQVGANDGETIDIDLKQINSQTLGLDSLNVHGAPVDPASPWTENPLQKIDAALAQVDALRSDLGAVQNRFNSAITNLGNTVNNLSEARSRIEDSDYATEVSNMSRAQILQQAGTSVLAQANQVPQNVLSLLREFSRYPAQWRPLC

SEQ ID NO: 333 - protein, 277 aa, Artificial Sequence
  STF2delta.HingeCys
MAQVINTNSLSLLTQNNLNKSQSALGTAIERLSSGLRINSAKDDAAGQAIANRFTANIKGLTQASRNANDGISIAQTTEGALNEINNNLQRVRELAVQSANSTNSQSDLDSIQAEITQRLNEIDRVSGQTQFNGVKVLAQDNTLTIQVGANDGETIDIDLKQINSQTLGLDSLNVHGAPVDPACPWTENPLQKIDAALAQVDALRSDLGAVQNRFNSAITNLGNTVNNLSEARSRIEDSDYATEVSNMSRAQILQQAGTSVLAQANQVPQNVLSLLR

SEQ ID NO: 334 - protein, 278 aa, Artificial Sequence
  5'Cys.STF2delta
MCAQVINTNSLSLLTQNNLNKSQSALGTAIERLSSGLRINSAKDDAAGQAIANRFTANIKGLTQASRNANDGISIAQTTEGALNEINNNLQRVRELAVQSANSTNSQSDLDSIQAEITQRLNEIDRVSGQTQFNGVKVLAQDNTLTIQVGANDGETIDIDLKQINSQTLGLDSLNVHGAPVDPASPWTENPLQKIDAALAQVDALRSDLGAVQNRFNSAITNLGNTVNNLSEARSRIEDSDYATEVSNMSRAQILQQAGTSVLAQANQVPQNVLSLLR

SEQ ID NO: 335 - protein, 8 aa, Artificial Sequence
  lipopeptide
CSKKKKGC

SEQ ID NO: 336 - protein, 10 aa, Artificial Sequence
  linker
GAPVDPASPW

SEQ ID NO: 337 - protein, 19 aa, Artificial Sequence
  H1C1 peptide
NIPSIQSRGLFFAIAGFIE

SEQ ID NO: 338 - protein, 20 aa, Artificial Sequence
  Cys H1C1
CNIPSIQSRGLFFAIAGFIE

SEQ ID NO: 339 - protein, 20 aa, Artificial Sequence
  Lys H1C1
KNIPSIQSRGLFFAIAGFIE

SEQ ID NO: 340 - DNA, 1518 bp, Artificial Sequence; identical to SEQ ID NO: 51
  STF2.b1p

SEQ ID NO: 341 - protein, 19 aa, Artificial Sequence
  HA maturation cleavage fragment (H1N1)
NIPSIQSRGLFGAIAGFIE

SEQ ID NO: 342 - protein, 529 aa, Artificial Sequence
  STF2.1xH1C1
MAQVINTNSLSLLTQNNLNKSQSALGTAIERLSSGLRINSAKDDAAGQAIANRFTANIKGLTQASRNANDGISIAQTTEGALNEINNNLQRVRELAVQSANSTNSQSDLDSIQAEITQRLNEIDRVSGQTQFNGVKVLAQDNTLTIQVGANDGETIDIDLKQINSQTLGLDSLNVQKAYDVKDTAVTTKAYANNGTTLDVSGLDDAAIKAATGGTNGTASVTGGAVKFDADNNKYFVTIGGFTGADAAKNGDYEVNVATDGTVTLAAGATKTTMPAGATTKTEVQELKDTPAVVSADAKNALIAGGVDATDANGAELVKMSYTDKNGKTIEGGYALKAGDKYYAADYDEATGAIKAKTTSYTAADGTTKTAANQLGGVDGKTEVVTIDGKTYNASKAAGHDFKAQPELAEAAAKTTENPLQKIDAALAQVDALRSDLGAVQNRFNSAITNLGNTVNNLSEARSRIEDSDYATEVSNMSRAQILQQAGTSVLAQANQVPQNVLSLLAMEWENIPSIQSRGLFGAIAGFIE

SEQ ID NO: 343 - protein, 551 aa, Artificial Sequence
  STF2.2xH1C1
MAQVINTNSLSLLTQNNLNKSQSALGTAIERLSSGLRINSAKDDAAGQAIANRFTANIKGLTQASRNANDGISIAQTTEGALNEINNNLQRVRELAVQSANSTNSQSDLDSIQAEITQRLNEIDRVSGQTQFNGVKVLAQDNTLTIQVGANDGETIDIDLKQINSQTLGLDSLNVQKAYDVKDTAVTTKAYANNGTTLDVSGLDDAAIKAATGGTNGTASVTGGAVKFDADNNKYFVTIGGFTGADAAKNGDYEVNVATDGTVTLAAGATKTTMPAGATTKTEVQELKDTPAVVSADAKNALIAGGVDATDANGAELVKMSYTDKNGKTIEGGYALKAGDKYYAADYDEATGAIKAKTTSYTAADGTTKTAANQLGGVDGKTEVVTIDGKTYNASKAAGHDFKAQPELAEAAAKTTENPLQKIDAALAQVDALRSDLGAVQNRFNSAITNLGNTVNNLSEARSRIEDSDYATEVSNMSRAQILQQAGTSVLAQANQVPQNVLSLLAMEWENIPSIQSRGLFGAIAGFIEEWENIPSIQSRGLFGAIAGFIE

SEQ ID NO: 344 - protein, 573 aa, Artificial Sequence
  STF2.3xH1C1
MAQVINTNSLSLLTQNNLNKSQSALGTAIERLSSGLRINSAKDDAAGQAIANRFTANIKGLTQASRNANDGISIAQTTEGALNEINNNLQRVRELAVQSANSTNSQSDLDSIQAEITQRLNEIDRVSGQTQFNGVKVLAQDNTLTIQVGANDGETIDIDLKQINSQTLGLDSLNVQKAYDVKDTAVTTKAYANNGTTLDVSGLDDAAIKAATGGTNGTASVTGGAVKFDADNNKYFVTIGGFTGADAAKNGDYEVNVATDGTVTLAAGATKTTMPAGATTKTEVQELKDTPAVVSADAKNALIAGGVDATDANGAELVKMSYTDKNGKTIEGGYALKAGDKYYAADYDEATGAIKAKTTSYTAADGTTKTAANQLGGVDGKTEVVTIDGKTYNASKAAGHDFKAQPELAEAAAKTTENPLQKIDAALAQVDALRSDLGAVQNRFNSAITNLGNTVNNLSEARSRIEDSDYATEVSNMSRAQILQQAGTSVLAQANQVPQNVLSLLAMEWENIPSIQSRGLFGAIAGFIEEWENIPSIQSRGLFGAIAGFIEEWENIPSIQSRGLFGAIAGFIE

SEQ ID NO: 345 - protein, 595 aa, Artificial Sequence
  STF2.4xH1C1
MAQVINTNSLSLLTQNNLNKSQSALGTAIERLSSGLRINSAKDDAAGQAIANRFTANIKGLTQASRNANDGISIAQTTEGALNEINNNLQRVRELAVQSANSTNSQSDLDSIQAEITQRLNEIDRVSGQTQFNGVKVLAQDNTLTIQVGANDGETIDIDLKQINSQTLGLDSLNVQKAYDVKDTAVTTKAYANNGTTLDVSGLDDAAIKAATGGTNGTASVTGGAVKFDADNNKYFVTIGGFTGADAAKNGDYEVNVATDGTVTLAAGATKTTMPAGATTKTEVQELKDTPAVVSADAKNALIAGGVDATDANGAELVKMSYTDKNGKTIEGGYALKAGDKYYAADYDEATGAIKAKTTSYTAADGTTKTAANQLGGVDGKTEVVTIDGKTYNASKAAGHDFKAQPELAEAAAKTTENPLQKIDAALAQVDALRSDLGAVQNRFNSAITNLGNTVNNLSEARSRIEDSDYATEVSNMSRAQILQQAGTSVLAQANQVPQNVLSLLAMEWENIPSIQSRGLFGAIAGFIEEWENIPSIQSRGLFGAIAGFIEEWENIPSIQSRGLFGAIAGFIEEWENIPSIQSRGLFGAIAGFIE

SEQ ID NO: 346 - protein, 601 aa, Artificial Sequence
  STF2.4xH1C2
MAQVINTNSLSLLTQNNLNKSQSALGTAIERLSSGLRINSAKDDAAGQAIANRFTANIKGLTQASRNANDGISIAQTTEGALNEINNNLQRVRELAVQSANSTNSQSDLDSIQAEITQRLNEIDRVSGQTQFNGVKVLAQDNTLTIQVGANDGETIDIDLKQINSQTLGLDSLNVQKAYDVKDTAVTTKAYANNGTTLDVSGLDDAAIKAATGGTNGTASVTGGAVKFDADNNKYFVTIGGFTGADAAKNGDYEVNVATDGTVTLAAGATKTTMPAGATTKTEVQELKDTPAVVSADAKNALIAGGVDATDANGAELVKMSYTDKNGKTIEGGYALKAGDKYYAADYDEATGAIKAKTTSYTAADGTTKTAANQLGGVDGKTEVVTIDGKTYNASKAAGHDFKAQPELAEAAAKTTENPLQKIDAALAQVDALRSDLGAVQNRFNSAITNLGNTVNNLSEARSRIEDSDYATEVSNMSRAQILQQAGTSVLAQANQVPQNVLSLLAGCGSEWENIPSIQSRGLFGAIAGFIEEWENIPSIQSRGLFGAIAGFIEEWENIPSIQSRGLFGAIAGFIEEWENIPSIQSRGLFGAIAGFIESGC

SEQ ID NO: 347 - protein, 19 aa, Artificial Sequence
  HA maturation cleavage fragment (H5N1)
RERRRKKRGLFGAIAGFIE

SEQ ID NO: 348 - protein, 594 aa, Artificial Sequence
  STF2.4xH5C1
MAQVINTNSLSLLTQNNLNKSQSALGTAIERLSSGLRINSAKDDAAGQAIANRFTANIKGLTQASRNANDGISIAQTTEGALNEINNNLQRVRELAVQSANSTNSQSDLDSIQAEITQRLNEIDRVSGQTQFNGVKVLAQDNTLTIQVGANDGETIDIDLKQINSQTLGLDSLNVQKAYDVKDTAVTTKAYANNGTTLDVSGLDDAAIKAATGGTNGTASVTGGAVKFDADNNKYFVTIGGFTGADAAKNGDYEVNVATDGTVTLAAGATKTTMPAGATTKTEVQELKDTPAVVSADAKNALIAGGVDATDANGAELVKMSYTDKNGKTIEGGYALKAGDKYYAADYDEATGAIKAKTTSYTAADGTTKTAANQLGGVDGKTEVVTIDGKTYNASKAAGHDFKAQPELAEAAAKTTENPLQKIDAALAQVDALRSDLGAVQNRFNSAITNLGNTVNNLSEARSRIEDSDYATEVSNMSRAQILQQAGTSVLAQANQVPQNVLSLLAEWERERRRKKRGLFGAIAGFIEEWERERRRKKRGLFGAIAGFIEEWERERRRKKRGLFGAIAGFIEEWERERRRKKRGLFGAIAGFIE

SEQ ID NO: 349 - protein, 19 aa, Artificial Sequence
  HA maturation cleavage fragment (H3N2)
NVPEKQTRGIFGAIAGFIE

SEQ ID NO: 350 - protein, 19 aa, Artificial Sequence
  HA maturation cleavage fragment
NVPQIESRGLFGAIAGFIE

SEQ ID NO: 351 - protein, 19 aa, Artificial Sequence
  HA maturation cleavage fragment (B strain)
PAKLLKERGFFGAIAGFLE

SEQ ID NO: 352 - DNA, 1798 bp, Artificial Sequence
  STF2.4xH1C1
atggcacaagtaatcaacactaacagtctgtcgctgctgacccagaataacctgaacaaatcccagtccgcactgggcaccgctatcgagcgtctgtcttctggtctgcgtatcaacagcgcgaaagacgatgcggcaggtcaggcgattgctaaccgtttcaccgcgaacatcaaaggtctgactcaggcttcccgtaacgctaacgacggtatctccattgcgcagaccactgaaggcgcgctgaacgaaatcaacaacaacctgcagcgtgtgcgtgaactggcggttcagtctgctaacagcaccaactcccagtctgacctcgactccatccaggctgaaatcacccagcgcctgaacgaaatcgaccgtgtatccggccagactcagttcaacggcgtgaaagtcctggcgcaggacaacaccctgaccatccaggttggcgccaacgacggtgaaactatcgatatcgatctgaagcagatcaactctcagaccctgggtctggactcactgaacgtgcagaaagcgtatgatgtgaaagatacagcagtaacaacgaaagcttatgccaataatggtactacactggatgtatcgggtcttgatgatgcagctattaaagcggctacgggtggtacgaatggtacggcttctgtaaccggtggtgcggttaaatttgacgcagataataacaagtactttgttactattggtggctttactggtgctgatgccgccaaaaatggcgattatgaagttaacgttgctactgacggtacagtaacccttgcggctggcgcaactaaaaccacaatgcctgctggtgcgacaactaaaacagaagtacaggagttaaaagatacaccggcagttgtttcagcagatgctaaaaatgccttaattgctggcggcgttgacgctaccgatgctaatggcgctgagttggtcaaaatgtcttataccgataaaaatggtaagacaattgaaggcggttatgcgcttaaagctggcgataagtattacgccgcagattacgatgaagcgacaggagcaattaaagctaaaactacaagttatactgctgctgacggcactaccaaaacagcggctaaccaactgggtggcgtagacggtaaaaccgaagtcgttactatcgacggtaaaacctacaatgccagcaaagccgctggtcatgatttcaaagcacaaccagagctggcggaagcagccgctaaaaccaccgaaaacccgctgcagaaaattgatgccgcgctggcgcaggtggatgcgctgcgctctgatctgggtgcggtacaaaaccgtttcaactctgctatcaccaacctgggcaataccgtaaacaatctgtctgaagcgcgtagccgtatcgaagattccgactacgcgaccgaagtttccaacatgtctcgcgcgcagattctgcagcaggccggtacttccgttctggcgcaggctaaccaggtcccgcagaacgtgctgtctctgttagcgatggaatgggagaacatccctagcatccaatctcgcggcctgtttggcgctatcgcgggctttatcgaagaatgggagaacatcccgagcatccaatctcgcggtctgtttggtgcgatcgctggtttcatcgaggagtgggagaacattcctagcattcaaagccgtggcctgttcggcgctattgcaggttttattgaagaatgggaaaatatcccgtctatccaatcccgcggtctgttcggcgcgatcgcaggtttcattgaataataagctaagc

SEQ ID NO: 353 - DNA, 1738 bp, Artificial Sequence
  STF2.3xH1C1
atggcacaagtaatcaacactaacagtctgtcgctgctgacccagaataacctgaacaaatcccagtccgcactgggcaccgctatcgagcgtctgtcttctggtctgcgtatcaacagcgcgaaagacgatgcggcaggtcaggcgattgctaaccgtttcaccgcgaacatcaaaggtctgactcaggcttcccgtaacgctaacgacggtatctccattgcgcagaccactgaaggcgcgctgaacgaaatcaacaacaacctgcagcgtgtgcgtgaactggcggttcagtctgctaacagcaccaactcccagtctgacctcgactccatccaggctgaaatcacccagcgcctgaacgaaatcgaccgtgtatccggccagactcagttcaacggcgtgaaagtcctggcgcaggacaacaccctgaccatccaggttggcgccaacgacggtgaaactatcgatatcgatctgaagcagatcaactctcagaccctgggtctggactcactgaacgtgcagaaagcgtatgatgtgaaagatacagcagtaacaacgaaagcttatgccaataatggtactacactggatgtatcgggtcttgatgatgcagctattaaagcggctacgggtggtacgaatggtacggcttctgtaaccggtggtgcggttaaatttgacgcagataataacaagtactttgttactattggtggctttactggtgctgatgccgccaaaaatggcgattatgaagttaacgttgctactgacggtacagtaacccttgcggctggcgcaactaaaaccacaatgcctgctggtgcgacaactaaaacagaagtacaggagttaaaagatacaccggcagttgtttcagcagatgctaaaaatgccttaattgctggcggcgttgacgctaccgatgctaatggcgctgagttggtcaaaatgtcttataccgataaaaatggtaagacaattgaaggcggttatgcgcttaaagctggcgataagtattacgccgcagattacgatgaagcgacaggagcaattaaagctaaaactacaagttatactgctgctgacggcactaccaaaacagcggctaaccaactgggtggcgtagacggtaaaaccgaagtcgttactatcgacggtaaaacctacaatgccagcaaagccgctggtcatgatttcaaagcacaaccagagctggcggaagcagccgctaaaaccaccgaaaacccgctgcagaaaattgatgccgcgctggcgcaggtggatgcgctgcgctctgatctgggtgcggtacaaaaccgtttcaactctgctatcaccaacctgggcaataccgtaaacaatctgtctgaagcgcgtagccgtatcgaagattccgactacgcgaccgaagtttccaacatgtctcgcgcgcagattctgcagcaggccggtacttccgttctggcgcaggctaaccaggtcccgcagaacgtgctgagcctgttagcgatggaatgggaaaatatccctagcatccaatctcgcggtctgttcggtgctattgctggcttcatcgaggaatgggagaacatcccatctattcagtctcgcggcctgtttggtgcgatcgcgggttttattgaggaatgggaaaacattccaagcattcagtcacgtggtcttttcggcgccatcgctggttttatcgaatgataagcttagcccaagg

SEQ ID NO: 354 - DNA, 1672 bp, Artificial Sequence
  STF2.2xH1C1
atggcacaagtaatcaacactaacagtctgtcgctgctgacccagaataacctgaacaaatcccagtccgcactgggcaccgctatcgagcgtctgtcttctggtctgcgtatcaacagcgcgaaagacgatgcggcaggtcaggcgattgctaaccgtttcaccgcgaacatcaaaggtctgactcaggcttcccgtaacgctaacgacggtatctccattgcgcagaccactgaaggcgcgctgaacgaaatcaacaacaacctgcagcgtgtgcgtgaactggcggttcagtctgctaacagcaccaactcccagtctgacctcgactccatccaggctgaaatcacccagcgcctgaacgaaatcgaccgtgtatccggccagactcagttcaacggcgtgaaagtcctggcgcaggacaacaccctgaccatccaggttggcgccaacgacggtgaaactatcgatatcgatctgaagcagatcaactctcagaccctgggtctggactcactgaacgtgcagaaagcgtatgatgtgaaagatacagcagtaacaacgaaagcttatgccaataatggtactacactggatgtatcgggtcttgatgatgcagctattaaagcggctacgggtggtacgaatggtacggcttctgtaaccggtggtgcggttaaatttgacgcagataataacaagtactttgttactattggtggctttactggtgctgatgccgccaaaaatggcgattatgaagttaacgttgctactgacggtacagtaacccttgcggctggcgcaactaaaaccacaatgcctgctggtgcgacaactaaaacagaagtacaggagttaaaagatacaccggcagttgtttcagcagatgctaaaaatgccttaattgctggcggcgttgacgctaccgatgctaatggcgctgagttggtcaaaatgtcttataccgataaaaatggtaagacaattgaaggcggttatgcgcttaaagctggcgataagtattacgccgcagattacgatgaagcgacaggagcaattaaagctaaaactacaagttatactgctgctgacggcactaccaaaacagcggctaaccaactgggtggcgtagacggtaaaaccgaagtcgttactatcgacggtaaaacctacaatgccagcaaagccgctggtcatgatttcaaagcacaaccagagctggcggaagcagccgctaaaaccaccgaaaacccgctgcagaaaattgatgccgcgctggcgcaggtggatgcgctgcgctctgatctgggtgcggtacaaaaccgtttcaactctgctatcaccaacctgggcaataccgtaaacaatctgtctgaagcgcgtagccgtatcgaagattccgactacgcgaccgaagtttccaacatgtctcgcgcgcagattctgcagcaggccggtacttccgttctggcgcaggctaaccaggtcccgcagaacgtgctgagcctgttagcgatggaatgggaaaatatccctagcatccaatctcgcggtctgttcggtgctattgctggcttcatcgaggaatgggagaacatcccatctattcagtctcgcggcctgtttggtgcgatcgcgggttttattgagtgataagcttagcccaagg

SEQ ID NO: 355 - DNA, 1606 bp, Artificial Sequence
  STF2.1xH1C1
atggcacaagtaatcaacactaacagtctgtcgctgctgacccagaataacctgaacaaatcccagtccgcactgggcaccgctatcgagcgtctgtcttctggtctgcgtatcaacagcgcgaaagacgatgcggcaggtcaggcgattgctaaccgtttcaccgcgaacatcaaaggtctgactcaggcttcccgtaacgctaacgacggtatctccattgcgcagaccactgaaggcgcgctgaacgaaatcaacaacaacctgcagcgtgtgcgtgaactggcggttcagtctgctaacagcaccaactcccagtctgacctcgactccatccaggctgaaatcacccagcgcctgaacgaaatcgaccgtgtatccggccagactcagttcaacggcgtgaaagtcctggcgcaggacaacaccctgaccatccaggttggcgccaacgacggtgaaactatcgatatcgatctgaagcagatcaactctcagaccctgggtctggactcactgaacgtgcagaaagcgtatgatgtgaaagatacagcagtaacaacgaaagcttatgccaataatggtactacactggatgtatcgggtcttgatgatgcagctattaaagcggctacgggtggtacgaatggtacggcttctgtaaccggtggtgcggttaaatttgacgcagataataacaagtactttgttactattggtggctttactggtgctgatgccgccaaaaatggcgattatgaagttaacgttgctactgacggtacagtaacccttgcggctggcgcaactaaaaccacaatgcctgctggtgcgacaactaaaacagaagtacaggagttaaaagatacaccggcagttgtttcagcagatgctaaaaatgccttaattgctggcggcgttgacgctaccgatgctaatggcgctgagttggtcaaaatgtcttataccgataaaaatggtaagacaattgaaggcggttatgcgcttaaagctggcgataagtattacgccgcagattacgatgaagcgacaggagcaattaaagctaaaactacaagttatactgctgctgacggcactaccaaaacagcggctaaccaactgggtggcgtagacggtaaaaccgaagtcgttactatcgacggtaaaacctacaatgccagcaaagccgctggtcatgatttcaaagcacaaccagagctggcggaagcagccgctaaaaccaccgaaaacccgctgcagaaaattgatgccgcgctggcgcaggtggatgcgctgcgctctgatctgggtgcggtacaaaaccgtttcaactctgctatcaccaacctgggcaataccgtaaacaatctgtctgaagcgcgtagccgtatcgaagattccgactacgcgaccgaagtttccaacatgtctcgcgcgcagattctgcagcaggccggtacttccgttctggcgcaggctaaccaggtcccgcagaacgtgctgagcctgttagcgatggaatgggaaaatatccctagcatccaatctcgcggtctgttcggtgctattgctggcttcatcgagtgataagcttagcccaagg

SEQ ID NO: 356 - DNA, 1816 bp, Artificial Sequence
  STF2.4xH1C1
atggcacaagtaatcaacactaacagtctgtcgctgctgacccagaataacctgaacaaatcccagtccgcactgggcaccgctatcgagcgtctgtcttctggtctgcgtatcaacagcgcgaaagacgatgcggcaggtcaggcgattgctaaccgtttcaccgcgaacatcaaaggtctgactcaggcttcccgtaacgctaacgacggtatctccattgcgcagaccactgaaggcgcgctgaacgaaatcaacaacaacctgcagcgtgtgcgtgaactggcggttcagtctgctaacagcaccaactcccagtctgacctcgactccatccaggctgaaatcacccagcgcctgaacgaaatcgaccgtgtatccggccagactcagttcaacggcgtgaaagtcctggcgcaggacaacaccctgaccatccaggttggcgccaacgacggtgaaactatcgatatcgatctgaagcagatcaactctcagaccctgggtctggactcactgaacgtgcagaaagcgtatgatgtgaaagatacagcagtaacaacgaaagcttatgccaataatggtactacactggatgtatcgggtcttgatgatgcagctattaaagcggctacgggtggtacgaatggtacggcttctgtaaccggtggtgcggttaaatttgacgcagataataacaagtactttgttactattggtggctttactggtgctgatgccgccaaaaatggcgattatgaagttaacgttgctactgacggtacagtaacccttgcggctggcgcaactaaaaccacaatgcctgctggtgcgacaactaaaacagaagtacaggagttaaaagatacaccggcagttgtttcagcagatgctaaaaatgccttaattgctggcggcgttgacgctaccgatgctaatggcgctgagttggtcaaaatgtcttataccgataaaaatggtaagacaattgaaggcggttatgcgcttaaagctggcgataagtattacgccgcagattacgatgaagcgacaggagcaattaaagctaaaactacaagttatactgctgctgacggcactaccaaaacagcggctaaccaactgggtggcgtagacggtaaaaccgaagtcgttactatcgacggtaaaacctacaatgccagcaaagccgctggtcatgatttcaaagcacaaccagagctggcggaagcagccgctaaaaccaccgaaaacccgctgcagaaaattgatgccgcgctggcgcaggtggatgcgctgcgctctgatctgggtgcggtacaaaaccgtttcaactctgctatcaccaacctgggcaataccgtaaacaatctgtctgaagcgcgtagccgtatcgaagattccgactacgcgaccgaagtttccaacatgtctcgcgcgcagattctgcagcaggccggtacttccgttctggcgcaggctaaccaggtcccgcagaacgtgctgtctctgttagcgggttgtggttccgagtgggaaaatattccgtctatccagagccgtggtctgttcggcgcaattgctggcttcattgaagaatgggaaaacatcccgtccatccagagccgtggcctgttcggcgccattgctggtttcatcgaggaatgggaaaacattccgtccatccagtcccgcggtctgtttggcgctatcgccggtttcattgaggaatgggaaaatatcccttccatccagtctcgtggtctgttcggcgcgattgcaggctttatcgaatctggttgctaataagctaagc

SEQ ID NO: 357 - protein, 78 aa, Bacterial lipoprotein of E. coli
MKATKLVLGAVILGSTLLAGCSSNAKIDQLSSDVQTLNAKVDQLSNDVNAMRSDVQAAKDDAARANQRLDNMATKYRK

SEQ ID NO: 358 - protein, 26 aa, Artificial Sequence
  H1C1 native peptide
SLWSEENIPSIQSRGLFGAIAGFIEE

SEQ ID NO: 359 - protein, 8 aa, Artificial Sequence
  TLR4 peptide
GGKSGRTG

SEQ ID NO: 360 - protein, 9 aa, Artificial Sequence
  TLR4 peptide
KGYDWLVVG

SEQ ID NO: 361 - protein, 10 aa, Artificial Sequence
  TLR4 peptide
EDMVYRIGVP

SEQ ID NO: 362 - protein, 6 aa, Artificial Sequence
  TLR4 peptide
VKLSGS

SEQ ID NO: 363 - protein, 8 aa, Artificial Sequence
  TLR4 peptide
GMLSLALF

SEQ ID NO: 364 - protein, 7 aa, Artificial Sequence
  TLR4 peptide
CVVGSVR

SEQ ID NO: 365 - protein, 8 aa, Artificial Sequence
  TLR4 peptide
IVRGCLGW

SEQ ID NO: 366 - protein, 8 aa, Artificial Sequence
  TLR4 peptide
AAEERTLG

SEQ ID NO: 367 - protein, 9 aa, Artificial Sequence
  TLR4 peptide
WARVVGWLR

SEQ ID NO: 368 - protein, 9 aa, Artificial Sequence
  TLR4 peptide
SEGYRLFGG

SEQ ID NO: 369 - protein, 10 aa, Artificial Sequence
  TLR4 peptide
LVGGVVRRGS

SEQ ID NO: 370 - protein, 10 aa, Artificial Sequence
  TLR4 peptide
GRVNDLWLAA

SEQ ID NO: 371 - protein, 10 aa, Artificial Sequence
  TLR4 peptide
SGWMLWREGS

SEQ ID NO: 372 - protein, 10 aa, Artificial Sequence
  TLR4 peptide
ERMEDRGGDL

SEQ ID NO: 373 - protein, 9 aa, Artificial Sequence
  TLR4 peptide
KLCCFTECM

SEQ ID NO: 374 - protein, 10 aa, Artificial Sequence
  TLR4 peptide
AVGSMERGRG

SEQ ID NO: 375 - protein, 9 aa, Artificial Sequence
  TLR4 peptide
RDWVGGDLV

SEQ ID NO: 376 - protein, 10 aa, Artificial Sequence
  TLR4 peptide
FFEVAKISQQ

SEQ ID NO: 377 - protein, 5 aa, Artificial Sequence
  TLR4 peptide
WWYWC

SEQ ID NO: 378 - protein, 7 aa, Artificial Sequence
  TLR4 peptide
MHLCSHA

SEQ ID NO: 379 - protein, 7 aa, Artificial Sequence
  TLR4 peptide
WLFRRIG

SEQ ID NO: 380 - protein, 7 aa, Artificial Sequence
  TLR4 peptide
YWFWRIG

SEQ ID NO: 381 - protein, 7 aa, Artificial Sequence
  TLR4 peptide
MHLYCIA

SEQ ID NO: 382 - protein, 8 aa, Artificial Sequence
  TLR4 peptide
WPLFPWIV

SEQ ID NO: 383 - protein, 7 aa, Artificial Sequence
  TLR4 peptide
DMRSHAR

SEQ ID NO: 384 - protein, 7 aa, Artificial Sequence
  TLR4 peptide
MHLCTHA

SEQ ID NO: 385 - protein, 6 aa, Artificial Sequence
  TLR4 peptide
NLFPFY

SEQ ID NO: 386 - protein, 7 aa, Artificial Sequence
  TLR4 peptide
MHLCTRA

SEQ ID NO: 387 - protein, 7 aa, Artificial Sequence
  TLR4 peptide
RHLWYHA

SEQ ID NO: 388 - protein, 7 aa, Artificial Sequence
  TLR4 peptide
WPFSAYW

SEQ ID NO: 389 - protein, 6 aa, Artificial Sequence
  TLR4 peptide
WYLRGS

SEQ ID NO: 390 - protein, 7 aa, Artificial Sequence
  TLR4 peptide
GKGTDLG

SEQ ID NO: 391 - protein, 6 aa, Artificial Sequence
  TLR4 peptide
IFVRMR

SEQ ID NO: 392 - protein, 7 aa, Artificial Sequence
  TLR4 peptide
WLFRPVF

SEQ ID NO: 393 - protein, 7 aa, Artificial Sequence
  TLR4 peptide
FLGWLMG

SEQ ID NO: 394 - protein, 7 aa, Artificial Sequence
  TLR4 peptide
MHLWHHA

SEQ ID NO: 395 - protein, 7 aa, Artificial Sequence
  TLR4 peptide
WWFPWKA

SEQ ID NO: 396 - protein, 7 aa, Artificial Sequence
  TLR4 peptide
WYLPWLG

SEQ ID NO: 397 - protein, 7 aa, Artificial Sequence
  TLR4 peptide
WPFPRTF

SEQ ID NO: 398 - protein, 7 aa, Artificial Sequence
  TLR4 peptide
WPFPAYW

SEQ ID NO: 399 - protein, 7 aa, Artificial Sequence
  TLR4 peptide
FLGLRWL

SEQ ID NO: 400 - protein, 10 aa, Artificial Sequence
  TLR4 peptide
SRTDVGVLEV

SEQ ID NO: 401 - protein, 10 aa, Artificial Sequence
  TLR4 peptide
REKVSRGDKG

SEQ ID NO: 402 - protein, 10 aa, Artificial Sequence
  TLR4 peptide
DWDAVESEYM

SEQ ID NO: 403 - protein, 10 aa, Artificial Sequence
  TLR4 peptide
VSSAQEVRVP

SEQ ID NO: 404 - protein, 10 aa, Artificial Sequence
  TLR4 peptide
LTYGGLEALG

SEQ ID NO: 405 - protein, 10 aa, Artificial Sequence
  TLR4 peptide
VEEYSSSGVS

SEQ ID NO: 406 - protein, 10 aa, Artificial Sequence
  TLR4 peptide
VCEVSDSVMA

SEQ ID NO: 407 - protein, 8 aa, Artificial Sequence
  TLR4 peptide
GGKSGRTG

SEQ ID NO: 408 - protein, 9 aa, Artificial Sequence
  TLR4 peptide
KGYDWLVVG

SEQ ID NO: 409 - protein, 10 aa, Artificial Sequence
  TLR4 peptide
EDMVYRIGVP

SEQ ID NO: 410 - protein, 6 aa, Artificial Sequence
  TLR4 peptide
VKLSGS

SEQ ID NO: 411 - protein, 8 aa, Artificial Sequence
  TLR4 peptide
GMLSLALF

SEQ ID NO: 412 - protein, 7 aa, Artificial Sequence
  TLR4 peptide
CVVGSVR

SEQ ID NO: 413 - protein, 8 aa, Artificial Sequence
  TLR4 peptide
IVRGCLGW

SEQ ID NO: 414 - protein, 8 aa, Artificial Sequence
  TLR4 peptide
AAEERTLG

SEQ ID NO: 415 - protein, 9 aa, Artificial Sequence
  TLR4 peptide
WARVVGWLR

SEQ ID NO: 416 - protein, 9 aa, Artificial Sequence
  TLR4 peptide
SEGYRLFGG

SEQ ID NO: 417 - protein, 10 aa, Artificial Sequence
  TLR4 peptide
LVGGVVRRGS

SEQ ID NO: 418 - protein, 10 aa, Artificial Sequence
  TLR4 peptide
GRVNDLWLAA

SEQ ID NO: 419 - protein, 10 aa, Artificial Sequence
  TLR4 peptide
SGWMLWREGS

SEQ ID NO: 420 - protein, 10 aa, Artificial Sequence
  TLR4 peptide
ERMEDRGGDL

SEQ ID NO: 421 - protein, 9 aa, Artificial Sequence
  TLR4 peptide
KLCCFTECM

SEQ ID NO: 422 - protein, 10 aa, Artificial Sequence
  TLR4 peptide
AVGSMERGRG

SEQ ID NO: 423 - protein, 9 aa, Artificial Sequence
  TLR4 peptide
RDWVGGDLV

SEQ ID NO: 424 - protein, 10 aa, Artificial Sequence
  TLR4 peptide
FFEVAKISQQ

SEQ ID NO: 425 - protein, 5 aa, Artificial Sequence
  TLR4 peptide
WWYWC

SEQ ID NO: 426 - protein, 7 aa, Artificial Sequence
  TLR4 peptide
MHLCSHA

SEQ ID NO: 427 - protein, 7 aa, Artificial Sequence
  TLR4 peptide
WLFRRIG

SEQ ID NO: 428 - protein, 7 aa, Artificial Sequence
  TLR4 peptide
YWFWRIG

SEQ ID NO: 429 - protein, 7 aa, Artificial Sequence
  TLR4 peptide
MHLYCIA

SEQ ID NO: 430 - protein, 8 aa, Artificial Sequence
  TLR4 peptide
WPLFPWIV

SEQ ID NO: 431 - protein, 7 aa, Artificial Sequence
  TLR4 peptide
DMRSHAR

SEQ ID NO: 432 - protein, 7 aa, Artificial Sequence
  TLR4 peptide
MHLCTHA

SEQ ID NO: 433 - protein, 6 aa, Artificial Sequence
  TLR4 peptide
NLFPFY

SEQ ID NO: 434 - protein, 7 aa, Artificial Sequence
  TLR4 peptide
MHLCTRA

SEQ ID NO: 435 - protein, 7 aa, Artificial Sequence
  TLR4 peptide
RHLWYHA

SEQ ID NO: 436 - protein, 7 aa, Artificial Sequence
  TLR4 peptide
WPFSAYW

SEQ ID NO: 437 - protein, 6 aa, Artificial Sequence
  TLR4 peptide
WYLRGS

SEQ ID NO: 438 - protein, 7 aa, Artificial Sequence
  TLR4 peptide
GKGTDLG

SEQ ID NO: 439 - protein, 6 aa, Artificial Sequence
  TLR4 peptide
IFVRMR

SEQ ID NO: 440 - protein, 7 aa, Artificial Sequence
  TLR4 peptide
WLFRPVF

SEQ ID NO: 441 - protein, 7 aa, Artificial Sequence
  TLR4 peptide
FLGWLMG

SEQ ID NO: 442 - protein, 7 aa, Artificial Sequence
  TLR4 peptide
MHLWHHA

SEQ ID NO: 443 - protein, 7 aa, Artificial Sequence
  TLR4 peptide
WWFPWKA

SEQ ID NO: 444 - protein, 7 aa, Artificial Sequence
  TLR4 peptide
WYLPWLG

SEQ ID NO: 445 - protein, 7 aa, Artificial Sequence
  TLR4 peptide
WPFPRTF

SEQ ID NO: 446 - protein, 7 aa, Artificial Sequence
  TLR4 peptide
WPFPAYW

SEQ ID NO: 447 - protein, 7 aa, Artificial Sequence
  TLR4 peptide
FLGLRWL

SEQ ID NO: 448 - protein, 10 aa, Artificial Sequence
  TLR4 peptide
SRTDVGVLEV

SEQ ID NO: 449 - protein, 10 aa, Artificial Sequence
  TLR4 peptide
REKVSRGDKG

SEQ ID NO: 450 - protein, 10 aa, Artificial Sequence
  TLR4 peptide
DWDAVESEYM

SEQ ID NO: 451 - protein, 10 aa, Artificial Sequence
  TLR4 peptide
VSSAQEVRVP

SEQ ID NO: 452 - protein, 10 aa, Artificial Sequence
  TLR4 peptide
LTYGGLEALG

SEQ ID NO: 453 - protein, 10 aa, Artificial Sequence
  TLR4 peptide
VEEYSSSGVS

SEQ ID NO: 454 - protein, 10 aa, Artificial Sequence
  TLR4 peptide
VCEVSDSVMA

SEQ ID NO: 455 - protein, 5 aa, Artificial Sequence
  TLR2 peptide
NPPTT

SEQ ID NO: 456 - protein, 5 aa, Artificial Sequence
  TLR2 peptide
MRRIL

SEQ ID NO: 457 - protein, 4 aa, Artificial Sequence
  TLR2 peptide
MISS

SEQ ID NO: 458 - protein, 5 aa, Artificial Sequence
  TLR2 peptide
RGGSK

SEQ ID NO: 459 - protein, 4 aa, Artificial Sequence
  TLR2 peptide
RGGF

SEQ ID NO: 460 - protein, 5 aa, Artificial Sequence
  TLR2 peptide
NRTVF

SEQ ID NO: 461 - protein, 5 aa, Artificial Sequence
  TLR2 peptide
NRFGL

SEQ ID NO: 462 - protein, 5 aa, Artificial Sequence
  TLR2 peptide
SRHGR

SEQ ID NO: 463 - protein, 5 aa, Artificial Sequence
  TLR2 peptide
IMRHP

SEQ ID NO: 464 - protein, 5 aa, Artificial Sequence
  TLR2 peptide
EVCAP

SEQ ID NO: 465 - protein, 5 aa, Artificial Sequence
  TLR2 peptide
ACGVY

SEQ ID NO: 466 - protein, 5 aa, Artificial Sequence
  TLR2 peptide
CGPKL

SEQ ID NO: 467 - protein, 5 aa, Artificial Sequence
  TLR2 peptide
AGCFS

SEQ ID NO: 468 - protein, 5 aa, Artificial Sequence
  TLR2 peptide
SGGLF

SEQ ID NO: 469 - protein, 5 aa, Artificial Sequence
  TLR2 peptide
AVRLS

SEQ ID NO: 470 - protein, 5 aa, Artificial Sequence
  TLR2 peptide
GGKLS

SEQ ID NO: 471 - protein, 5 aa, Artificial Sequence
  TLR2 peptide
VSEGV

SEQ ID NO: 472 - protein, 5 aa, Artificial Sequence
  TLR2 peptide
KCQSF

SEQ ID NO: 473 - protein, 5 aa, Artificial Sequence
  TLR2 peptide
FCGLG

SEQ ID NO: 474 - protein, 5 aa, Artificial Sequence
  TLR2 peptide
PESGV

SEQ ID NO: 475 - protein, 5 aa, Artificial Sequence
  TLR2 peptide
DPDSG

SEQ ID NO: 476 - protein, 5 aa, Artificial Sequence
  TLR2 peptide
IGRFR

SEQ ID NO: 477 - protein, 5 aa, Artificial Sequence
  TLR2 peptide
MGTLP

SEQ ID NO: 478 - protein, 5 aa, Artificial Sequence
  TLR2 peptide
ADTHQ

SEQ ID NO: 479 - protein, 5 aa, Artificial Sequence
  TLR2 peptide
HLLPG

SEQ ID NO: 480 - protein, 5 aa, Artificial Sequence
  TLR2 peptide
GPLLH

SEQ ID NO: 481 - protein, 5 aa, Artificial Sequence
  TLR2 peptide
NYRRW

SEQ ID NO: 482 - protein, 5 aa, Artificial Sequence
  TLR2 peptide
LRQGR

SEQ ID NO: 483 - protein, 5 aa, Artificial Sequence
  TLR2 peptide
IMWFP

SEQ ID NO: 484 - protein, 5 aa, Artificial Sequence
  TLR2 peptide
RVVAP

SEQ ID NO: 485 - protein, 5 aa, Artificial Sequence
  TLR2 peptide
IHVVP

SEQ ID NO: 486 - protein, 5 aa, Artificial Sequence
  TLR2 peptide
MFGVP

SEQ ID NO: 487 - protein, 5 aa, Artificial Sequence
  TLR2 peptide
CVWLQ

SEQ ID NO: 488 - protein, 5 aa, Artificial Sequence
  TLR2 peptide
IYKLA

SEQ ID NO: 489 - protein, 4 aa, Artificial Sequence
  TLR2 peptide
KGWF

SEQ ID NO: 490 - protein, 5 aa, Artificial Sequence
  TLR2 peptide
KYMPH

SEQ ID NO: 491 - protein, 5 aa, Artificial Sequence
  TLR2 peptide
VGKND

SEQ ID NO: 492 - protein, 5 aa, Artificial Sequence
  TLR2 peptide
THKPK

SEQ ID NO: 493 - protein, 5 aa, Artificial Sequence
  TLR2 peptide
SHIAL

SEQ ID NO: 494 - protein, 5 aa, Artificial Sequence
  TLR2 peptide
AWAGT

SEQ ID NO: 495 - protein, 20 aa, Artificial Sequence
  TLR2 peptide
KGGVGPVRRSSRLRRTTQPG

SEQ ID NO: 496 - protein, 23 aa, Artificial Sequence
  TLR2 peptide
GRRGLCRGCRTRGRIKQLQSAHK

SEQ ID NO: 497 - protein, 22 aa, Artificial Sequence
  TLR2 peptide
RWGYHLRDRKYKGVRSHKGVPR

SEQ ID NO: 498 - protein, 506 aa, S. typhimurium; identical to SEQ ID NO: 312

SEQ ID NO: 499 - DNA, 1518 bp, S. typhimurium; identical to SEQ ID NO: 178

SEQ ID NO: 500 - protein, 277 aa, S. typhimurium; identical to SEQ ID NO: 313

SEQ ID NO: 501 - DNA, 832 bp, S. typhimurium
atggcacaagtaatcaacactaacagtctgtcgctgctgacccagaataacctgaacaaatcccagtccgcactgggcaccgctatcgagcgtctgtcttctggtctgcgtatcaacagcgcgaaagacgatgcggcaggtcaggcgattgctaaccgtttcaccgcgaacatcaaaggtctgactcaggcttcccgtaacgctaacgacggtatctccattgcgcagaccactgaaggcgcgctgaacgaaatcaacaacaacctgcagcgtgtgcgtgaactggcggttcagtctgctaacagcaccaactcccagtctgacctcgactccatccaggctgaaatcacccagcgcctgaacgaaatcgaccgtgtatccggccagactcagttcaacggcgtgaaagtcctggcgcaggacaacaccctgaccatccaggttggcgccaacgacggtgaaactatcgatatcgatctgaagcagatcaactctcagaccctgggtctggactcactgaacgtgcatggagcgccggtggatcctgctagcccatggaccgaaaacccgctgcagaaaattgatgccgcgctggcgcaggtggatgcgctgcgctctgatctgggtgcggtacaaaaccgtttcaactctgctatcaccaacctgggcaataccgtaaacaatctgtctgaagcgcgtagccgtatcgaagattccgactacgcgaccgaagtttccaacatgtctcgcgcgcagattttgcagcaggccggtacttccgttctggcgcaggctaaccaggtcccgcagaacgtgctgtctctgttacgtg

SEQ ID NO: 502 - protein, 595 aa, E. coli
MAQVINTNSLSLITQNNINKNQSALSSSIERLSSGLRINSAKDDAAGQAIANRFTSNIKGLTQAARNANDGISVAQTTEGALSEINNNLQRIRELTVQASTGTNSDSDLDSIQDEIKSRLDEIDRVSGQTQFNGVNVLAKDGSMKIQVGANDGQTITIDLKKIDSDTLGLNGFNVNGSGTIANKAATISDLTAAKMDAATNTITTTNNALTASKALDQLKDGDTVTIKADAAQTATVYTYNASAGNFSLSNVSNNTSEKAGDVAASLLPPAGQTASGVYKAASGEVNFDVDANGKITIGGQKAYLTSDGNLTTNDAGGATAATLDGLFKKAGDGQSIGFKKTASVTMGGTTYNFKTGADADAATANAGVSFTDTASKETVLNKVATAKQGKAAAADGDTSATITYKSGVQTYQAVFAAGDGTASAKYADKADVSNATATYTDADGEMTTIGSYTTKYSIDANNGKVTVDSGTGTGKYAPKVGAEVYVSANGTLTTDATSEGTVTKDPLKALDEAISSIDKFRSSLGAIQNRLDSAVTNLNNTTTNLSEAQSRIQDADYATEVSNMSKAQIIQQAGNSVLAKANQVPQQVLSLLQG

SEQ ID NO: 503 - DNA, 1788 bp, E. coli
atggcacaagtcattaataccaacagcctctcgctgatcactcaaaataatatcaacaagaaccagtctgcgctgtcgagttctatcgagcgtctgtcttctggcttgcgtattaacagcgcgaaggatgacgccgcaggtcaggcgattgctaaccgttttacttctaacattaaaggcctgactcaggctgcacgtaacgccaacgacggtatttccgttgcgcagaccaccgaaggcgcgctgtccgaaatcaacaacaacttacagcgtatccgtgaactgacggttcaggcttctaccgggactaactccgattcagatctggactccattcaggacgaaatcaaatcccgtctggacgaaattgaccgcgtatctggccagacccagttcaacggcgtgaacgtactggcgaaagacggttcaatgaaaattcaggttggtgcgaatgacggccagactatcacgattgatctgaagaaaattgactcagatacgctggggctgaatggttttaacgtgaatggttccggtacgatagccaataaagcggcgaccattagcgacctgacagcagcgaaaatggatgctgcaactaatactataactacaacaaataatgcgctgactgcatcaaaggcgcttgatcaactgaaagatggtgacactgttactatcaaagcagatgctgctcaaactgccacggtttatacatacaatgcatcagctggtaacttctcactcagtaatgtatcgaataatacttcagaaaaagcaggtgatgtagcagctagccttctcccgccggctgggcaaactgctagtggtgtttataaagcagcaagcggtgaagtgaactttgatgttgatgcgaatggtaaaatcacaatcggaggacagaaagcatatttaactagtgatggtaacttaactacaaacgatgctggtggtgcgactgcggctacgcttgatggtttattcaagaaagctggtgatggtcaatcaatcgggtttaagaagactgcatcagtcacgatggggggaacaacttataactttaaaacgggtgctgatgctgatgctgcaactgctaacgcaggggtatcgttcactgatacagctagcaaagaaaccgttttaaataaagtggctacagctaaacaaggcaaagcagctgcagctgacggtgatacatccgcaacaattacctataaatctggcgttcagacgtatcaggctgtatttgccgcaggtgacggtactgctagcgcaaaatatgccgataaagctgacgtttctaatgcaacagcaacatacactgatgctgatggtgaaatgactacaattggttcatacaccacgaagtattcaatcgatgctaacaacggcaaggtaactgttgattctggaactggtacgggtaaatatgcgccgaaagtaggggctgaagtatatgttagtgctaatggtactttaacaacagatgcaactagcgaaggcacagtaacaaaagatccactgaaagctctggatgaagctatcagctccatcgacaaattccgttcttccctgggtgctatccagaaccgtctggattccgcagtcaccaacctgaacaacaccactaccaacctgtccgaagcgcagtcccgtattcaggacgccgactatgcgaccgaagtgtccaacatgtcgaaagcgcagatcattcagcaggccggtaactccgtgctggcaaaagccaaccaggtaccgcagcaggttctgtctctgctgcagggttag

SEQ ID NO: 504 - protein, 506 aa, s. muenchen
MAQVINTNSLSLLTQNNLNKSQSALGTAIERLSSGLRINSAKDDAAGQAIANRFTANIKGLTQASRNANDGISIAQTTEGALNEINNNLQRVRELAVQSANGTNSQSDLDSIQAEITQRLNEIDRVSGQTQFNGVKVLAQDNTLTIQVGANDGETIDIDLKEISSKTLGLDKLNVQDAYTPKETAVTVDKTTYKNGTDTITAQSNTDIQTAIGGGATGVTGADIKFKDGQYYLDVKGGASAGVYKATYDETTKKVNIDTTDKTPLATAEATAIRGTATITHNQIAEVTKEGVDTTTVAAQLAAAGVTGADKDNTSLVKLSFEDKNGKVIDGGYAVKMGDDFYAATYDEKTGTITAKTTTYTDGAGVAQTGAVKFGGANGKSEVVTATDGKTYLASDLDKHNFRTGGELKEVNTDKTENPLQKIDAALAQVDTLRSDLGAVQNRFNSAITNLGNTVNNLSSARSRIEDSDYATEVSNMSRAQILQQAGTSVLAQANQVPQNVLSLLR

SEQ ID NO: 505 - DNA, 1522 bp, s. muenchen
aatggcacaagtcattaatacaaacagcctgtcgctgttgacccagaataacctgaacaaatcccagtccgctctgggcaccgctatcgagcgtctgtcttccggtctgcgtatcaacagcgcgaaagacgatgcggcaggtcaggcgattgctaaccgtttcaccgcgaacatcaaaggtctgactcaggcttcccgtaacgctaacgacggtatctccattgcgcagaccactgaaggcgcgctgaacgaaatcaacaacaacctgcagcgtgtgcgtgaactggcggttcagtctgctaacggtactaactcccagtctgaccttgactctatccaggctgaaatcacccagcgtctgaacgaaatcgaccgtgtatccggtcagactcagttcaacggcgtgaaagtcctggcgcaggacaacaccctgaccatccaggttggtgccaacgacggtgaaactattgatattgatttaaaagaaattagctctaaaacactgggacttgataagcttaatgtccaggatgcctacaccccgaaagaaactgctgtaaccgttgataaaactacctataaaaatggtacagatactattacagcccagagcaatactgatatccaaactgcaattggcggtggtgcaacgggggttactggggctgatatcaaatttaaagatggtcaatactatttagatgttaaaggcggtgcttctgctggtgtttataaagccacttatgatgaaactacaaagaaagttaatattgatacgactgataaaactccgttagcaactgcggaagctacagctattcggggaacggccactataacccacaaccaaattgctgaagtaacaaaagagggtgttgatacgaccacagttgcggctcaacttgctgctgcaggggttactggtgccgataaggacaatactagccttgtaaaactatcgtttgaggataaaaacggtaaggttattgatggtggctatgcagtgaaaatgggcgacgatttctatgccgctacatatgatgagaaaacaggtacaattactgctaaaacaaccacttatacagatggtgctggcgttgctcaaactggagctgtgaaatttggtggcgcaaatggtaaatctgaagttgttactgctaccgatggtaaaacttacttagcaagcgaccttgacaaacataacttcagaacaggcggtgagcttaaagaggttaatacagataagactgaaaacccactgcagaaaattgatgctgccttggcacaggttgatacacttcgttctgacctgggtgcggtacagaaccgtttcaactccgctatcaccaacctgggcaataccgtaaataacctgtcttctgcccgtagccgtatcgaagattccgactacgcgaccgaagtctccaacatgtctcgcgcgcagattctgcagcaggccggtacctccgttctggcgcaggctaaccaggttccgcaaaacgtcctctctttactgcgttaa

SEQ ID NO: 506 - protein, 588 aa, Artificial Sequence
  pMT/STF2
MKLCILLAVVAFVGLSLGRSAQVINTNSLSLLTQNNLNKSQSALGTAIERLSSGLRINSAKDDAAGQAIANRFTANIKGLTQASRNANDGISIAQTTEGALNEINNNLQRVRELAVQSANSTNSQSDLDSIQAEITQRLNEIDRVSGQTQFNGVKVLAQDNTLTIQVGANDGETIDIDLKQINSQTLGLDSLNVQKAYDVKDTAVTTKAYANNGTTLDVSGLDDAAIKAATGGTNGTASVTGGAVKFDADNNKYFVTIGGFTGADAAKNGDYEVNVATDGTVTLAAGATKTTMPAGATTKTEVQELKDTPAVVSADAKNALIAGGVDATDANGAELVKMSYTDKNGKTIEGGYALKAGDKYYAADYDEATGAIKAKTTSYTAADGTTKTAANQLGGVDGKTEVVTIDGKTYNASKAAGHDFKAQPELAEAAAKTTENPLQKIDAALAQVDALRSDLGAVQNRFNSAITNLGNTVNNLSEARSRIEDSDYATEVSNMSRAQILQQAGTSVLAQANQVPQNVLSLLRKGNSKLEGQLEFPRTSPVWWNSADIQHSGGRSSLEGPRFEGKPIPNPLLGLDSTRTGHHHHHH

SEQ ID NO: 507 - DNA, 1764 bp, Artificial Sequence
  pMT/STF2
atgaagttatgcatattactggccgtcgtggcctttgttggcctctcgctcgggagatctgcacaagtaatcaacactaacagtctgtcgctgctgacccagaataacctgaacaaatcccagtccgcactgggcaccgctatcgagcgtctgtcttctggtctgcgtatcaacagcgcgaaagacgatgcggcaggtcaggcgattgctaaccgtttcaccgcgaacatcaaaggtctgactcaggcttcccgtaacgctaacgacggtatctccattgcgcagaccactgaaggcgcgctgaacgaaatcaacaacaacctgcagcgtgtgcgtgaactggcggttcagtctgctaacagcaccaactcccagtctgacctcgactccatccaggctgaaatcacccagcgcctgaacgaaatcgaccgtgtatccggccagactcagttcaacggcgtgaaagtcctggcgcaggacaacaccctgaccatccaggttggcgccaacgacggtgaaactatcgatatcgatctgaagcagatcaactctcagaccctgggtctggactcactgaacgtgcagaaagcgtatgatgtgaaagatacagcagtaacaacgaaagcttatgccaataatggtactacactggatgtatcgggtcttgatgatgcagctattaaagcggctacgggtggtacgaatggtacggcttctgtaaccggtggtgcggttaaatttgacgcagataataacaagtactttgttactattggtggctttactggtgctgatgccgccaaaaatggcgattatgaagttaacgttgctactgacggtacagtaacccttgcggctggcgcaactaaaaccacaatgcctgctggtgcgacaactaaaacagaagtacaggagttaaaagatacaccggcagttgtttcagcagatgctaaaaatgccttaattgctggcggcgttgacgctaccgatgctaatggcgctgagttggtcaaaatgtcttataccgataaaaatggtaagacaattgaaggcggttatgcgcttaaagctggcgataagtattacgccgcagattacgatgaagcgacaggagcaattaaagctaaaactacaagttatactgctgctgacggcactaccaaaacagcggctaaccaactgggtggcgtagacggtaaaaccgaagtcgttactatcgacggtaaaacctacaatgccagcaaagccgctggtcatgatttcaaagcacaaccagagctggcggaagcagccgctaaaaccaccgaaaacccgctgcagaaaattgatgccgcgctggcgcaggtggatgcgctgcgctctgatctgggtgcggtacaaaaccgtttcaactctgctatcaccaacctgggcaataccgtaaacaatctgtctgaagcgcgtagccgtatcgaagattccgactacgcgaccgaagtttccaacatgtctcgcgcgcagattctgcagcaggccggtacttccgttctggcgcaggctaaccaggtcccgcagaacgtgctgtctctgttacgtaagggcaattcgaagcttgaaggtcaattggaattccctaggactagtccagtgtggtggaattctgcagatatccagcacagtggcggccgctcgagtctagagggcccgcggttcgaaggtaagcctatccctaaccctctcctcggtctcgattctacgcgtaccggtcatcatcaccatcaccat

SEQ ID NO: 508 - protein, 97 aa, Artificial Sequence
  M2 Influenza A
MSLLTEVETPIRNEWGCRCNDSSDPLVVAASIIGILHLILWILDRLFFKCIYRLFKHGLKRGPSTEGVPESMREEYRKEQQNAVDADDSHFVSIELE

SEQ ID NO: 509 - DNA, 294 bp, Artificial Sequence
  M2 Influenza A
atgagccttctaaccgaggtcgaaacacctatcagaaacgaatgggggtgcagatgcaacgattcaagtgacccgcttgttgttgccgcgagtatcattgggatcttgcacttgatattgtggattcttgatcgtctttttttcaaatgcatctatcgactcttcaaacacggccttaaaagagggccttctacggaaggagtacctgagtctatgagggaagaatatcgaaaggaacagcagaatgctgtggatgctgacgacagtcattttgtcagcatagagttggagtaa

SEQ ID NO: 510 - protein, 24 aa, Artificial Sequence
  M2
SLLTEVETPIRNEWGCRCNDSSDP

SEQ ID NO: 511 - DNA, 75 bp, Artificial Sequence
  M2
atgagcctgctgaccgaggtcgaaacaccgatccgcaacgaatgggggtgccgctgcaacgattcaagtgacccg

SEQ ID NO: 512 - protein, 11 aa, Artificial Sequence
  M2
EVETPIRNEWG

SEQ ID NO: 513 - DNA, 30 bp, Artificial Sequence
  M2
gaggtcgaaacacctatcagaaacgaatgg

SEQ ID NO: 514 - DNA, 315 bp, Artificial Sequence
  4XM2e
agcttgctgactgaggttgagaccccgattcgcaacgaatggggttcccgttccaacgattcttccgacccgctcgagagcctgttgaccgaggttgaaacccctatccgtaatgaatggggctcccgtagcaacgactcttctgacccaggatcctccctcttgaccgaagtggaaacgcctattcgtaatgagtggggttctcgtagcaatgacagctcggacccggagctctcgctgctgacggaagtggagactccgatccgtaacgagtggggctctcgctctaacgatagctcagacccgtctagataa

SEQ ID NO: 515 - protein, 104 aa, Artificial Sequence
  4XM2e
SLLTEVETPIRNEWGSRSNDSSDPLESLLTEVETPIRNEWGSRSNDSSDPGSSLLTEVETPIRNEWGSRSNDSSDPELSLLTEVETPIRNEWGSRSNDSSDPSR

SEQ ID NO: 516 - protein, 9 aa, Artificial Sequence
  M2
EVETPIRNE

SEQ ID NO: 517 - protein, 8 aa, Artificial Sequence
  M2
EVETPIRN

SEQ ID NO: 518 - protein, 24 aa, Artificial Sequence
  M2
MKATKLVLGAVILGSTLLAGCSSN

SEQ ID NO: 519 - DNA, 75 bp, Artificial Sequence
  M2
atgaaagctactaaactggtactgggcgcggtaatcctgggttctactctgctgctggcaggttgctccagcaac

SEQ ID NO: 520 - DNA, 48 bp, Artificial Sequence
  Linker
aagggcaattcgaagcttgaaggtcaattggaattccctaggactagt

SEQ ID NO: 521 - protein, 16 aa, Artificial Sequence
  Linker
KGNSKLEGQLEFPRTS

SEQ ID NO: 522 - DNA, 36 bp, Artificial Sequence
  Linker
gaattctgcagatatccagcacagtggcggccgctc

SEQ ID NO: 523 - protein, 12 aa, Artificial Sequence
  Linker
EFCRYPAQWRPL

SEQ ID NO: 524 - protein, 12 aa, Artificial Sequence
  Linker
EFSRYPAQWRPL

SEQ ID NO: 525 - DNA, 36 bp, Artificial Sequence
  Linker
gaattctctagatatccagcacagtggcggccgctc

SEQ ID NO: 526 - protein, 45 aa, Artificial Sequence
  Linker
KGNSKLEGQLEFPRTSPVWWNSADIQHSGGRQCDGYLQNSPLRPL

SEQ ID NO: 527 - DNA, 135 bp, Artificial Sequence
  Linker
aagggcaattcgaagcttgaaggtcaattggaattccctaggactagtccagtgtggtggaattctgcagatatccagcacagtggcggccgccagtgtgatggatatctgcagaattcgcccttgcggccgctc

SEQ ID NO: 528 - protein, 611 aa, Artificial Sequence; identical to SEQ ID NO: 94
  STF2-4XM2e

SEQ ID NO: 529 - DNA, 1836 bp, Artificial Sequence
  STF2-4XM2e
atggcacaagtaatcaacactaacagtctgtcgctgctgacccagaataacctgaacaaatcccagtccgcactgggcaccgctatcgagcgtctgtcttctggtctgcgtatcaacagcgcgaaagacgatgcggcaggtcaggcgattgctaaccgtttcaccgcgaacatcaaaggtctgactcaggcttcccgtaacgctaacgacggtatctccattgcgcagaccactgaaggcgcgctgaacgaaatcaacaacaacctgcagcgtgtgcgtgaactggcggttcagtctgctaacagcaccaactcccagtctgacctcgactccatccaggctgaaatcacccagcgcctgaacgaaatcgaccgtgtatccggccagactcagttcaacggcgtgaaagtcctggcgcaggacaacaccctgaccatccaggttggcgccaacgacggtgaaactatcgatatcgatctgaagcagatcaactctcagaccctgggtctggactcactgaacgtgcagaaagcgtatgatgtgaaagatacagcagtaacaacgaaagcttatgccaataatggtactacactggatgtatcgggtcttgatgatgcagctattaaagcggctacgggtggtacgaatggtacggcttctgtaaccggtggtgcggttaaatttgacgcagataataacaagtactttgttactattggtggctttactggtgctgatgccgccaaaaatggcgattatgaagttaacgttgctactgacggtacagtaacccttgcggctggcgcaactaaaaccacaatgcctgctggtgcgacaactaaaacagaagtacaggagttaaaagatacaccggcagttgtttcagcagatgctaaaaatgccttaattgctggcggcgttgacgctaccgatgctaatggcgctgagttggtcaaaatgtcttataccgataaaaatggtaagacaattgaaggcggttatgcgcttaaagctggcgataagtattacgccgcagattacgatgaagcgacaggagcaattaaagctaaaaccacaagttatactgctgctgacggcactaccaaaacagcggctaaccaactgggtggcgtagacggtaaaaccgaagtcgttactatcgacggtaaaacctacaatgccagcaaagccgctggtcatgatttcaaagcacaaccagagctggcggaagcagccgctaaaaccaccgaaaacccgctgcagaaaattgatgccgcgctggcgcaggtggatgcgctgcgctctgatctgggtgcggtacaaaaccgtttcaactctgctatcaccaacctgggcaataccgtaaacaatctgtctgaagcgcgtagccgtatcgaagattccgactacgcgaccgaagtttccaacatgtctcgcgcgcagattttgcagcaggccggtacttccgttctggcgcaggctaaccaggtcccgcagaacgtgctgtctctgttacgtctgagcttgctgactgaggttgagaccccgattcgcaacgaatggggttcccgttccaacgattcttccgacccgctcgagagcctgttgaccgaggttgaaacccctatccgtaatgaatggggctcccgtagcaacgactcttctgacccaggatcctccctcttgaccgaagtggaaacgcctattcgtaatgagtggggttctcgtagcaatgacagctcggacccggagctctcgctgctgacggaagtggagactccgatccgtaacgagtggggctctcgctctaacgatagctcagacccgtctagataa

SEQ ID NO: 530 - protein, 19 aa, Artificial Sequence
  HA
PAKLLKERGRRGAIAGFLE

SEQ ID NO: 531 - protein, 10 aa, Artificial Sequence
  HA
EVETPIRNEW

SEQ ID NO: 532 - protein, 26 aa, Artificial Sequence
  HA FluB
SLWSEEPAKLLKERGFFGAIAGFLEE

SEQ ID NO: 533 - protein, 26 aa, Artificial Sequence
  HA FluA H1/H0
SLWSEENIPSIQSRGLFGAIAGFIEE

SEQ ID NO: 534 - protein, 26 aa, Artificial Sequence
  HA FluA H3/H0
SLWSEENVPEKQTRGIFGAIAGFIEE

SEQ ID NO: 535 - protein, 30 aa, Artificial Sequence
  HA Flu A H5/H0
SLWSEEEWEERERRRKKRGLFGAIAGFIEE

SEQ ID NO: 536 - protein, 24 aa, Artificial Sequence
  M2
SLLTEVETPTRNEWESRSSDSSDP

SEQ ID NO: 537 - protein, 24 aa, Artificial Sequence
  M2
SLLTEVETPTRNEWECRCSDSSDP

SEQ ID NO: 538 - protein, 24 aa, Artificial Sequence
  M2
SLLTEVETLTRNGWGSRSSDSSDP

SEQ ID NO: 539 - protein, 24 aa, Artificial Sequence
  M2
SLLTEVETLTRNGWGCRCSDSSDP

SEQ ID NO: 540 - protein, 24 aa, Artificial Sequence
  M2
SLLTEVETPTRNGWESKSSDSSDP

SEQ ID NO: 541 - protein, 24 aa, Artificial Sequence
  M2
SLLTEVETPTRNGWECKCSDSSDP

SEQ ID NO: 542 - protein, 24 aa, Artificial Sequence
  M2
SLLTEVETLTRNGWESKSRDSSDP

SEQ ID NO: 543 - protein, 24 aa, Artificial Sequence
  M2
SLLTEVETLTRNGWECKCRDSSDP

SEQ ID NO: 544 - protein, 24 aa, Artificial Sequence
  M2
SLLTEVETPIRNEWGSRSNDSSDP

SEQ ID NO: 545 - protein, 24 aa, Artificial Sequence
  M2
SLLTEVETPIRNEWGCRCNGSSDP

SEQ ID NO: 546 - protein, 24 aa, Artificial Sequence
  M2
SLLTEVETPIRNEWGCKCNDSSDP

SEQ ID NO: 547 - protein, 24 aa, Artificial Sequence
  M2
SLLTEVETPIRNEWGCRCNDSSDP

SEQ ID NO: 548 - protein, 24 aa, Artificial Sequence
  M2
SLLTEVETPIRNEWGCRCNDSSDP

SEQ ID NO: 549 - protein, 24 aa, Artificial Sequence
  M2
SLLTEVETPIRNEWECRCNGSSDP

SEQ ID NO: 550 - protein, 24 aa, Artificial Sequence
  M2
SLLTEVETPTRNEWECRCSDSSDP

SEQ ID NO: 551 - protein, 24 aa, Artificial Sequence
  M2
SLLTEVETPIRNEWGSRSNGSSDP

SEQ ID NO: 552 - protein, 24 aa, Artificial Sequence
  M2
SLLTEVETLTRNGWGCRCSDSSDP

SEQ ID NO: 553 - protein, 24 aa, Artificial Sequence
  M2
SLLTEVETPTRNEWECRCSDSSDP

SEQ ID NO: 554 - protein, 24 aa, Artificial Sequence
  M2
SLLTEVETPTRNGWECKCSDSSDP

SEQ ID NO: 555 - protein, 24 aa, Artificial Sequence
  M2
SLLTEVETPTRNGWGCRCSGSSDP

SEQ ID NO: 556 - protein, 24 aa, Artificial Sequence
  M2
SLLTEVETLTRNGWECKCRDSSDP

SEQ ID NO: 557 - protein, 811 aa, Artificial Sequence
  STF2delta.HA
MAQVINTNSLSLLTQNNLNKSQSALGTAIERLSSGLRINSAKDDAAGQAIANRFTANIKGLTQASRNANDGISIAQTTEGALNEINNNLQRVRELAVQSANSTNSQSDLDSIQAEITQRLNEIDRVSGQTQFNGVKVLAQDNTLTIQVGANDGETIDIDLKQINSQTLGLDSLNVHGAPVDPASPWTENPLQKIDAALAQVDALRSDLGAVQNRFNSAITNLGNTVNNLSEARSRIEDSDYATEVSNMSRAQILQQAGTSVLAQANQVPQNVLSLLREFSRYPAQWRPLDQICIGYHANNSTEQVDTIMEKNVTVTHAQDILEKKHNGKLCDLDGVKPLILRDCSVAGWLLGNPMCDEFINVPEWSYIVEKANPVNDLCYPGDFNDYEELKHLLSRINHFEKIQIIPKSSWSSHEASLGVSSACPYQGKSSFFRNVVWLIKKNSTYPTIKRSYNNTNQEDLLVLWGIHHPNDAAEQTKLYQNPTTYISVGTSTLNQRLVPRIATRSKVNGQSGRMEFFWTILKPNDAINFESNGNFIAPEYAYKIVKKGDSTIMKSELEYGNCNTKCQTPMGAINSSMPFHNIHPLTIGECPKYVKSNRLVLATGLRNSPQRERRRKKRGLFGAIAGFIEGGWQGMVDGWYGYHHSNEQGSGYAADKESTQKAIDGVTNKVNSIIDKMNTQFEAVGREFNNLERRIENLNKKMEDGFLDVWTYNAELLVLMENERTLDFHDSNVKNLYDKVRLQLRDNAKELGNGCFEFYHKCDNECMESVRNGTYDYPQYSEEARLKREEISGVKLESIGIYQILSIYST

SEQ ID NO: 558 - DNA, 2439 bp, Artificial Sequence
  STF2delta.HA
atggcacaagtaatcaacactaacagtctgtcgctgctgacccagaataacctgaacaaatcccagtccgcactgggcaccgctatcgagcgtctgtcttctggtctgcgtatcaacagcgcgaaagacgatgcggcaggtcaggcgattgctaaccgtttcaccgcgaacatcaaaggtctgactcaggcttcccgtaacgctaacgacggtatctccattgcgcagaccactgaaggcgcgctgaacgaaatcaacaacaacctgcagcgtgtgcgtgaactggcggttcagtctgctaacagcaccaactcccagtctgacctcgactccatccaggctgaaatcacccagcgcctgaacgaaatcgaccgtgtatccggccagactcagttcaacggcgtgaaagtcctggcgcaggacaacaccctgaccatccaggttggcgccaacgacggtgaaactatcgatatcgatctgaagcagatcaactctcagaccctgggtctggactcactgaacgtgcatggagcgccggtggatcctgctagcccatggaccgaaaacccgctgcagaaaattgatgccgcgctggcgcaggtggatgcgctgcgctctgatctgggtgcggtacaaaaccgtttcaactctgctatcaccaacctgggcaataccgtaaacaatctgtctgaagcgcgtagccgtatcgaagattccgactacgcgaccgaagtttccaacatgtctcgcgcgcagattttgcagcaggccggtacttccgttctggcgcaggctaaccaggtcccgcagaacgtgctgtctctgttacgtgaattctctagatatccagcacagtggcggccgctcgaccagatctgtatcggttatcatgctaacaattctactgaacaagtagatactatcatggagaagaacgttacagttacacatgcacaagatatcctggaaaagaagcataatggaaaactgtgtgaccttgatggtgttaaaccactaatattgcgtgactgctcagttgctgggtggttgttggggaatccaatgtgcgacgaatttatcaacgttccagaatggagttacattgttgaaaaagctaaccctgttaacgacttgtgttacccaggcgattttaatgactacgaggaacttaagcatttgttgtcaagaattaaccacttcgagaaaattcaaattattccaaagtcatcttggtcctcccatgaagcatccctaggagtctcttccgcttgcccttaccaaggcaagagttccttttttcgtaatgtcgtctggctgatcaaaaagaactccacctatccaactataaagagatcatacaacaacacaaatcaggaggatctgctagttctgtggggcattcaccaccccaatgacgcagctgagcagactaaattgtaccaaaacccaactacctatatatcagttggtacctcaactcttaaccagcgactagtcccccgtattgctactaggtcaaaggttaatggtcaaagtggacgaatggagtttttctggactattttgaagcccaacgatgccatcaacttcgaaagtaatggaaatttcatagcccctgagtacgcttacaaaatcgttaaaaagggtgattccactatcatgaaatctgaactggaatacggaaactgtaacaccaaatgccagacgccaatgggtgccatcaactcttctatgccttttcacaacattcatcctttgactattggtgaatgcccaaagtacgtcaaatctaaccgtttggtgttggctactggtctaaggaactcccctcagcgtgaaagaagaagaaagaagaggggattattcggtgctatcgctggatttattgagggaggatggcagggaatggtcgatggctggtatggttaccatcactcaaatgaacagggaagtggatacgcagctgataaagaatctactcaaaaggctatcgacggtgttacaaacaaggtcaattctattatcgataagatgaatacacagtttgaggctgttggtagagagttcaataatcttgagagaagaatcgaaaacctgaacaagaaaatggaagacggatttttagatgtatggacttacaatgctgagttgttggtcttgatggagaatgaacgaacgttggacttccatgactccaatgtgaagaacctatatgacaaagtgaggctgcaacttagagacaacgccaaggaattgggaaacgggtgcttcgagttttaccacaaatgcgacaacgaatgtatggaatcagtgagaaacggtacctatgattacccccaatattccgaggaggcaagactgaagagagaagagatatctggtgtaaagttggaatccatcggtatttatcagattctatctatatattctacctaatag

SEQ ID NO: 559 - protein, 800 aa, Artificial Sequence; identical to SEQ ID NO: 177
  STF2delta.HA (PR8)

SEQ ID NO: 560 - DNA, 2439 bp, Artificial Sequence; identical to SEQ ID NO: 558
  STF2delta.HA (PR8)

SEQ ID NO: 561 - protein, 511 aa, Artificial Sequence; identical to SEQ ID NO: 23
  HA (PR8)

SEQ ID NO: 562 - DNA, 1572 bp, Artificial Sequence
  HA (PR8)
gaccagatctgtatcggttatcatgctaacaattctactgaacaagtagatactatcatggagaagaacgttacagttacacatgcacaagatatcctggaaaagaagcataatggaaaactgtgtgaccttgatggtgttaaaccactaatattgcgtgactgctcagttgctgggtggttgttggggaatccaatgtgcgacgaatttatcaacgttccagaatggagttacattgttgaaaaagctaaccctgttaacgacttgtgttacccaggcgattttaatgactacgaggaacttaagcatttgttgtcaagaattaaccacttcgagaaaattcaaattattccaaagtcatcttggtcctcccatgaagcatccctaggagtctcttccgcttgcccttaccaaggcaagagttccttttttcgtaatgtcgtctggctgatcaaaaagaactccacctatccaactataaagagatcatacaacaacacaaatcaggaggatctgctagttctgtggggcattcaccaccccaatgacgcagctgagcagactaaattgtaccaaaacccaactacctatatatcagttggtacctcaactcttaaccagcgactagtcccccgtattgctactaggtcaaaggttaatggtcaaagtggacgaatggagtttttctggactattttgaagcccaacgatgccatcaacttcgaaagtaatggaaatttcatagcccctgagtacgcttacaaaatcgttaaaaagggtgattccactatcatgaaatctgaactggaatacggaaactgtaacaccaaatgccagacgccaatgggtgccatcaactcttctatgccttttcacaacattcatcctttgactattggtgaatgcccaaagtacgtcaaatctaaccgtttggtgttggctactggtctaaggaactcccctcagcgtgaaagaagaagaaagaagaggggattattcggtgctatcgctggatttattgagggaggatggcagggaatggtcgatggctggtatggttaccatcactcaaatgaacagggaagtggatacgcagctgataaagaatctactcaaaaggctatcgacggtgttacaaacaaggtcaattctattatcgataagatgaatacacagtttgaggctgttggtagagagttcaataatcttgagagaagaatcgaaaacctgaacaagaaaatggaagacggatttttagatgtatggacttacaatgctgagttgttggtcttgatggagaatgaacgaacgttggacttccatgactccaatgtgaagaacctatatgacaaagtgaggctgcaacttagagacaacgccaaggaattgggaaacgggtgcttcgagttttaccacaaatgcgacaacgaatgtatggaatcagtgagaaacggtacctatgattacccccaatattccgaggaggcaagactgaagagagaagagatatctggtgtaaagttggaatccatcggtatttatcagattctatctatatattctacctaatag

SEQ ID NO: 563 - protein, 261 aa, E. coli
MAQVINTNSLSLITQNNINKNQSALSSSIERLSSGLRINSAKDDAAGQAIANRFTSNIKGLTQAARNANDGISVAQTTEGALSEINNNLQRIRELTVQASTGTNSDSDLDSIQDEIKSRLDEIDRVSGQTQFNGVNVLAKDGSMKIQVGANDGQTITIDLKKIDSDTLGTKDPLKALDEAISSIDKFRSSLGAIQNRLDSAVTNLNNTTTNLSEAQSRIQDADYATEVSNMSKAQIIQQAGNSVLAKANQVPQQVLSLLQG

SEQ ID NO: 564 - protein, 522 aa, Artificial Sequence
  H5N1 HA
DQICIGYHANNSTEQVDTIMEKNVTVTHAQDILEKKHNGKLCDLDGVKPLILRDCSVAGWLLGNPMCDEFINVPEWSYIVEKANPVNDLCYPGDFNDYEELKHLLSRINHFEKIQIIPKSSWSSHEASLGVSSACPYQGKSSFFRNVVWLIKKNSTYPTIKRSYNNTNQEDLLVLWGIHHPNDAAEQTKLYQNPTTYISVGTSTLNQRLVPRIATRSKVNGQSGRMEFFWTILKPNDAINFESNGNFIAPEYAYKIVKKGDSTIMKSELEYGNCNTKCQTPMGAINSSMPFHNIHPLTIGECPKYVKSNRLVLATGLRNSPQRERRRKKRGLFGAIAGFIEGGWQGMVDGWYGYHHSNEQGSGYAADKESTQKAIDGVTNKVNSIIDKMNTQFEAVGREFNNLERRIENLNKKMEDGFLDVWTYNAELLVLMENERTLDFHDSNVKNLYDKVRLQLRDNAKELGNGCFEFYHKCDNECMESVRNGTYDYPQYSEEARLKREEISGVKLESIGIYQILSIYST

SEQ ID NO: 565 - DNA, 1572 bp, Artificial Sequence; identical to SEQ ID NO: 562
  H5N1 HA

SEQ ID NO: 566 - DNA, 43 bp, Artificial Sequence
  Primer
  m = a or c
cgctcttcamtgagcttgctgactgaggttgagaccccgattc

SEQ ID NO: 567 - DNA, 50 bp, Artificial Sequence
  Primer
cgctcttcacgcttattatctagacgggtctgagctatcgttagagcgag

SEQ ID NO: 568 - DNA, 41 bp, Artificial Sequence
  Primer
gctcttcagcggctgagcaataactagcataaccccttggg

SEQ ID NO: 569 - DNA, 39 bp, Artificial Sequence
  Primer
cgctcttcacagacgtaacagagacagcacgttctgcgg

SEQ ID NO: 570 - protein, 24 aa, Artificial Sequence
  M2
SLLTEVETPIRNEWGSKSNDSSDP

SEQ ID NO: 571 - protein, 24 aa, Artificial Sequence
  M2
SLLTEVETPIRNEWGSRSNDSSDP

SEQ ID NO: 572 - protein, 24 aa, Artificial Sequence
  M2
SLLTEVETPIRNEWESRSNGSSDP

SEQ ID NO: 573 - protein, 24 aa, Artificial Sequence
  M2
SLLTEVETPTRNEWESRSSDSSDP

SEQ ID NO: 574 - protein, 24 aa, Artificial Sequence
  M2
SLLTEVETLTRNGWGSRSSDSSDP

SEQ ID NO: 575 - protein, 24 aa, Artificial Sequence
  M2
SLLTEVETPTRNEWESRSSDSSDP

SEQ ID NO: 576 - protein, 24 aa, Artificial Sequence
  M2
SLLTEVETPTRNGWESKSSDSSDP

SEQ ID NO: 577 - protein, 24 aa, Artificial Sequence
  M2
SLLTEVETPTRNGWGSRSSGSSDP

SEQ ID NO: 578 - protein, 24 aa, Artificial Sequence
  M2
SLLTEVETLTRNGWESKSRDSSDP

SEQ ID NO: 579 - protein, 641 aa, Artificial Sequence
  pMT/STF2.4XM2e (H1)
MKLCILLAVVAFVGLSLGRSAQVINTNSLSLLTQNNLNKSQSALGTAIERLSSGLRINSAKDDAAGQAIANRFTANIKGLTQASRNANDGISIAQTTEGALNEINNNLQRVRELAVQSANSTNSQSDLDSIQAEITQRLNEIDRVSGQTQFNGVKVLAQDNTLTIQVGANDGETIDIDLKQINSQTLGLDSLNVQKAYDVKDTAVTTKAYANNGTTLDVSGLDDAAIKAATGGTNGTASVTGGAVKFDADNNKYFVTIGGFTGADAAKNGDYEVNVATDGTVTLAAGATKTTMPAGATTKTEVQELKDTPAVVSADAKNALIAGGVDATDANGAELVKMSYTDKNGKTIEGGYALKAGDKYYAADYDEATGAIKAKTTSYTAADGTTKTAANQLGGVDGKTEVVTIDGKTYNASKAAGHDFKAQPELAEAAAKTTENPLQKIDAALAQVDALRSDLGAVQNRFNSAITNLGNTVNNLSEARSRIEDSDYATEVSNMSRAQILQQAGTSVLAQANQVPQNVLSLLRKGNSKLEGQLEFSLLTEVETPIRNEWGSRSNDSSDPLESLLTEVETPIRNEWGSRSNDSSDPGSSLLTEVETPIRNEWGSRSNDSSDPELSLLTEVETPIRNEWGSRSNDSSDPSR

SEQ ID NO: 580 - DNA, 1926 bp, Artificial Sequence
  pMT/STF2.4XM2e (H1)
atgaagttatgcatattactggccgtcgtggcctttgttggcctctcgctcgggagatctgcacaagtaatcaacactaacagtctgtcgctgctgacccagaataacctgaacaaatcccagtccgcactgggcaccgctatcgagcgtctgtcttctggtctgcgtatcaacagcgcgaaagacgatgcggcaggtcaggcgattgctaaccgtttcaccgcgaacatcaaaggtctgactcaggcttcccgtaacgctaacgacggtatctccattgcgcagaccactgaaggcgcgctgaacgaaatcaacaacaacctgcagcgtgtgcgtgaactggcggttcagtctgctaacagcaccaactcccagtctgacctcgactccatccaggctgaaatcacccagcgcctgaacgaaatcgaccgtgtatccggccagactcagttcaacggcgtgaaagtcctggcgcaggacaacaccctgaccatccaggttggcgccaacgacggtgaaactatcgatatcgatctgaagcagatcaactctcagaccctgggtctggactcactgaacgtgcagaaagcgtatgatgtgaaagatacagcagtaacaacgaaagcttatgccaataatggtactacactggatgtatcgggtcttgatgatgcagctattaaagcggctacgggtggtacgaatggtacggcttctgtaaccggtggtgcggttaaatttgacgcagataataacaagtactttgttactattggtggctttactggtgctgatgccgccaaaaatggcgattatgaagttaacgttgctactgacggtacagtaacccttgcggctggcgcaactaaaaccacaatgcctgctggtgcgacaactaaaacagaagtacaggagttaaaagatacaccggcagttgtttcagcagatgctaaaaatgccttaattgctggcggcgttgacgctaccgatgctaatggcgctgagttggtcaaaatgtcttataccgataaaaatggtaagacaattgaaggcggttatgcgcttaaagctggcgataagtattacgccgcagattacgatgaagcgacaggagcaattaaagctaaaactacaagttatactgctgctgacggcactaccaaaacagcggctaaccaactgggtggcgtagacggtaaaaccgaagtcgttactatcgacggtaaaacctacaatgccagcaaagccgctggtcatgatttcaaagcacaaccagagctggcggaagcagccgctaaaaccaccgaaaacccgctgcagaaaattgatgccgcgctggcgcaggtggatgcgctgcgctctgatctgggtgcggtacaaaaccgtttcaactctgctatcaccaacctgggcaataccgtaaacaatctgtctgaagcgcgtagccgtatcgaagattccgactacgcgaccgaagtttccaacatgtctcgcgcgcagattctgcagcaggccggtacttccgttctggcgcaggctaaccaggtcccgcagaacgtgctgtctctgttacgtaagggcaattcgaagcttgaaggtcaattggaattcagcttgctgactgaggttgagaccccgattcgcaacgaatggggttcccgttccaacgattcttccgacccgctcgagagcctgttgaccgaggttgaaacccctatccgtaatgaatggggctcccgtagcaacgactcttctgacccaggatcctccctcttgaccgaagtggaaacgcctattcgtaatgagtggggttctcgtagcaatgacagctcggacccggagctctcgctgctgacggaagtggagactccgatccgtaacgagtggggctctcgctctaacgatagctcagacccgtctagataa

SEQ ID NO: 581 - protein, 641 aa, Artificial Sequence
  pMT/STF2.4XM2e (H5)
MKLCILLAVVAFVGLSLGRSAQVINTNSLSLLTQNNLNKSQSALGTAIERLSSGLRINSAKDDAAGQAIANRFTANIKGLTQASRNANDGISIAQTTEGALNEINNNLQRVRELAVQSANSTNSQSDLDSIQAEITQRLNEIDRVSGQTQFNGVKVLAQDNTLTIQVGANDGETIDIDLKQINSQTLGLDSLNVQKAYDVKDTAVTTKAYANNGTTLDVSGLDDAAIKAATGGTNGTASVTGGAVKFDADNNKYFVTIGGFTGADAAKNGDYEVNVATDGTVTLAAGATKTTMPAGATTKTEVQELKDTPAVVSADAKNALIAGGVDATDANGAELVKMSYTDKNGKTIEGGYALKAGDKYYAADYDEATGAIKAKTTSYTAADGTTKTAANQLGGVDGKTEVVTIDGKTYNASKAAGHDFKAQPELAEAAAKTTENPLQKIDAALAQVDALRSDLGAVQNRFNSAITNLGNTVNNLSEARSRIEDSDYATEVSNMSRAQILQQAGTSVLAQANQVPQNVLSLLRKGNSKLEGQLEFSLLTEVETPTRNEWESRSSDSSDPLESLLTEVETPTRNEWESRSSDSSDPESSLLTEVETPTRNEWESRSSDSSDPGSSLLTEVETPTRNEWESRSSDSSDPSR

SEQ ID NO: 582 - DNA, 1927 bp, Artificial Sequence
  pMT/STF2.4XM2e (H5)
atgaagttatgcatattactggccgtcgtggcctttgttggcctctcgctcgggagatctgcacaagtaatcaacactaacagtctgtcgctgctgacccagaataacctgaacaaatcccagtccgcactgggcaccgctatcgagcgtctgtcttctggtctgcgtatcaacagcgcgaaagacgatgcggcaggtcaggcgattgctaaccgtttcaccgcgaacatcaaaggtctgactcaggcttcccgtaacgctaacgacggtatctccattgcgcagaccactgaaggcgcgctgaacgaaatcaacaacaacctgcagcgtgtgcgtgaactggcggttcagtctgctaacagcaccaactcccagtctgacctcgactccatccaggctgaaatcacccagcgcctgaacgaaatcgaccgtgtatccggccagactcagttcaacggcgtgaaagtcctggcgcaggacaacaccctgaccatccaggttggcgccaacgacggtgaaactatcgatatcgatctgaagcagatcaactctcagaccctgggtctggactcactgaacgtgcagaaagcgtatgatgtgaaagatacagcagtaacaacgaaagcttatgccaataatggtactacactggatgtatcgggtcttgatgatgcagctattaaagcggctacgggtggtacgaatggtacggcttctgtaaccggtggtgcggttaaatttgacgcagataataacaagtactttgttactattggtggctttactggtgctgatgccgccaaaaatggcgattatgaagttaacgttgctactgacggtacagtaacccttgcggctggcgcaactaaaaccacaatgcctgctggtgcgacaactaaaacagaagtacaggagttaaaagatacaccggcagttgtttcagcagatgctaaaaatgccttaattgctggcggcgttgacgctaccgatgctaatggcgctgagttggtcaaaatgtcttataccgataaaaatggtaagacaattgaaggcggttatgcgcttaaagctggcgataagtattacgccgcagattacgatgaagcgacaggagcaattaaagctaaaactacaagttatactgctgctgacggcactaccaaaacagcggctaaccaactgggtggcgtagacggtaaaaccgaagtcgttactatcgacggtaaaacctacaatgccagcaaagccgctggtcatgatttcaaagcacaaccagagctggcggaagcagccgctaaaaccaccgaaaacccgctgcagaaaattgatgccgcgctggcgcaggtggatgcgctgcgctctgatctgggtgcggtacaaaaccgtttcaactctgctatcaccaacctgggcaataccgtaaacaatctgtctgaagcgcgtagccgtatcgaagattccgactacgcgaccgaagtttccaacatgtctcgcgcgcagattctgcagcaggccggtacttccgttctggcgcaggctaaccaggtcccgcagaacgtgctgtctctgttacgtaagggcaattcgaagcttgaaggtcaattggaattctctctgctgactgaagtagaaactccaacgcgtaatgaatgggaatcccgttctagcgactcctctgatcctctcgagtccctgctgacggaggttgaaaccccgacccgcaacgagtgggaaagccgttcctccgattcctctgatccggagagcagcctgctgaccgaggtagaaaccccgacccgtaatgagtgggaatctcgctcctctgattcttctgacccgggatcctctctgctgaccgaagtggagactccgactcgcaacgaatgggagagccgttcttctgactcctctgacccgtctagataat

SEQ ID NO: 583 - protein, 749 aa, Artificial Sequence
  pMT/STF2.4XM2e (H1 H5)
MKLCILLAVVAFVGLSLGRSAQVINTNSLSLLTQNNLNKSQSALGTAIERLSSGLRINSAKDDAAGQAIANRFTANIKGLTQASRNANDGISIAQTTEGALNEINNNLQRVRELAVQSANSTNSQSDLDSIQAEITQRLNEIDRVSGQTQFNGVKVLAQDNTLTIQVGANDGETIDIDLKQINSQTLGLDSLNVQKAYDVKDTAVTTKAYANNGTTLDVSGLDDAAIKAATGGTNGTASVTGGAVKFDADNNKYFVTIGGFTGADAAKNGDYEVNVATDGTVTLAAGATKTTMPAGATTKTEVQELKDTPAVVSADAKNALIAGGVDATDANGAELVKMSYTDKNGKTIEGGYALKAGDKYYAADYDEATGAIKAKTTSYTAADGTTKTAANQLGGVDGKTEVVTIDGKTYNASKAAGHDFKAQPELAEAAAKTTENPLQKIDAALAQVDALRSDLGAVQNRFNSAITNLGNTVNNLSEARSRIEDSDYATEVSNMSRAQILQQAGTSVLAQANQVPQNVLSLLRKGNSKLEGQLEFSLLTEVETPIRNEWGSRSNDSSDPLESLLTEVETPIRNEWGSRSNDSSDPGSSLLTEVETPIRNEWGSRSNDSSDPELSLLTEVETPIRNEWGSRSNDSSDPSRSREFSLLTEVETPTRNEWESRSSDSSDPLESLLTEVETPTRNEWESRSSDSSDPESSLLTEVETPTRNEWESRSSDSSDPGSSLLTEVETPTRNEWESRSSDSSDPSR

SEQ ID NO: 584 - DNA, 2250 bp, Artificial Sequence
  pMT/STF2.4XM2e (H1 H5)
atgaagttatgcatattactggccgtcgtggcctttgttggcctctcgctcgggagatctgcacaagtaatcaacactaacagtctgtcgctgctgacccagaataacctgaacaaatcccagtccgcactgggcaccgctatcgagcgtctgtcttctggtctgcgtatcaacagcgcgaaagacgatgcggcaggtcaggcgattgctaaccgtttcaccgcgaacatcaaaggtctgactcaggcttcccgtaacgctaacgacggtatctccattgcgcagaccactgaaggcgcgctgaacgaaatcaacaacaacctgcagcgtgtgcgtgaactggcggttcagtctgctaacagcaccaactcccagtctgacctcgactccatccaggctgaaatcacccagcgcctgaacgaaatcgaccgtgtatccggccagactcagttcaacggcgtgaaagtcctggcgcaggacaacaccctgaccatccaggttggcgccaacgacggtgaaactatcgatatcgatctgaagcagatcaactctcagaccctgggtctggactcactgaacgtgcagaaagcgtatgatgtgaaagatacagcagtaacaacgaaagcttatgccaataatggtactacactggatgtatcgggtcttgatgatgcagctattaaagcggctacgggtggtacgaatggtacggcttctgtaaccggtggtgcggttaaatttgacgcagataataacaagtactttgttactattggtggctttactggtgctgatgccgccaaaaatggcgattatgaagttaacgttgctactgacggtacagtaacccttgcggctggcgcaactaaaaccacaatgcctgctggtgcgacaactaaaacagaagtacaggagttaaaagatacaccggcagttgtttcagcagatgctaaaaatgccttaattgctggcggcgttgacgctaccgatgctaatggcgctgagttggtcaaaatgtcttataccgataaaaatggtaagacaattgaaggcggttatgcgcttaaagctggcgataagtattacgccgcagattacgatgaagcgacaggagcaattaaagctaaaactacaagttatactgctgctgacggcactaccaaaacagcggctaaccaactgggtggcgtagacggtaaaaccgaagtcgttactatcgacggtaaaacctacaatgccagcaaagccgctggtcatgatttcaaagcacaaccagagctggcggaagcagccgctaaaaccaccgaaaacccgctgcagaaaattgatgccgcgctggcgcaggtggatgcgctgcgctctgatctgggtgcggtacaaaaccgtttcaactctgctatcaccaacctgggcaataccgtaaacaatctgtctgaagcgcgtagccgtatcgaagattccgactacgcgaccgaagtttccaacatgtctcgcgcgcagattctgcagcaggccggtacttccgttctggcgcaggctaaccaggtcccgcagaacgtgctgtctctgttacgtaagggcaattcgaagcttgaaggtcaattggaattcagcttgctgactgaggttgagaccccgattcgcaacgaatggggttcccgttccaacgattcttccgacccgctcgagagcctgttgaccgaggttgaaacccctatccgtaatgaatggggctcccgtagcaacgactcttctgacccaggatcctccctcttgaccgaagtggaaacgcctattcgtaatgagtggggttctcgtagcaatgacagctcggacccggagctctcgctgctgacggaagtggagactccgatccgtaacgagtggggctctcgctctaacgatagctcagacccgtctagatctagagaattctctctgctgactgaagtagaaactccaacgcgtaatgaatgggaatcccgttctagcgactcctctgatcctctcgagtccctgctgacggaggttgaaaccccgacccgcaacgagtgggaaagccgttcctccgattcctctgatccggagagcagcctgctgaccgaggtagaaaccccgacccgtaatgagtgggaatctcgctcctctgattcttctgacccgggatcctctctgctgaccgaagtggagactccgactcgcaacgaatgggagagccgttcttctgactcctctgacccgtctagataa

SEQ ID NO: 585 - protein, 318 aa, Artificial Sequence
  pMT/STF2delta
MKLCILLAVVAFVGLSLGRSAQVINTNSLSLLTQNNLNKSQSALGTAIERLSSGLRINSAKDDAAGQAIANRFTANIKGLTQASRNANDGISIAQTTEGALNEINNNLQRVRELAVQSANSTNSQSDLDSIQAEITQRLNEIDRVSGQTQFNGVKVLAQDNTLTIQVGANDGETIDIDLKQINSQTLGLDSLNVHGAPVDPASPWTENPLQKIDAALAQVDALRSDLGAVQNRFNSAITNLGNTVNNLSEARSRIEDSDYATEVSNMSRAQILQQAGTSVLAQANQVPQNVLSLLREFSRYPAQWRPLTRTGHHHHHH

SEQ ID NO: 586 - DNA, 957 bp, Artificial Sequence
  pMT/STF2delta
atgaagttatgcatattactggccgtcgtggcctttgttggcctctcgctcgggagatctgcacaagtaatcaacactaacagtctgtcgctgctgacccagaataacctgaacaaatcccagtccgcactgggcaccgctatcgagcgtctgtcttctggtctgcgtatcaacagcgcgaaagacgatgcggcaggtcaggcgattgctaaccgtttcaccgcgaacatcaaaggtctgactcaggcttcccgtaacgctaacgacggtatctccattgcgcagaccactgaaggcgcgctgaacgaaatcaacaacaacctgcagcgtgtgcgtgaactggcggttcagtctgctaacagcaccaactcccagtctgacctcgactccatccaggctgaaatcacccagcgcctgaacgaaatcgaccgtgtatccggccagactcagttcaacggcgtgaaagtcctggcgcaggacaacaccctgaccatccaggttggcgccaacgacggtgaaactatcgatatcgatctgaagcagatcaactctcagaccctgggtctggactcactgaacgtgcatggagcgccggtggatcctgctagcccatggaccgaaaacccgctgcagaaaattgatgccgcgctggcgcaggtggatgcgctgcgctctgatctgggtgcggtacaaaaccgtttcaactctgctatcaccaacctgggcaataccgtaaacaatctgtctgaagcgcgtagccgtatcgaagattccgactacgcgaccgaagtttccaacatgtctcgcgcgcagattttgcagcaggccggtacttccgttctggcgcaggctaaccaggtcccgcagaacgtgctgtctctgttacgtgaattctctagatatccagcacagtggcggccgctcacgcgtaccggtcatcatcaccatcaccattga

SEQ ID NO: 587 - protein, 402 aa, Artificial Sequence
  pMT/STF2delta.4XM2e (H1)
MKLCILLAVVAFVGLSLGRSAQVINTNSLSLLTQNNLNKSQSALGTAIERLSSGLRINSAKDDAAGQAIANRFTANIKGLTQASRNANDGISIAQTTEGALNEINNNLQRVRELAVQSANSTNSQSDLDSIQAEITQRLNEIDRVSGQTQFNGVKVLAQDNTLTIQVGANDGETIDIDLKQINSQTLGLDSLNVHGAPVDPASPWTENPLQKIDAALAQVDALRSDLGAVQNRFNSAITNLGNTVNNLSEARSRIEDSDYATEVSNMSRAQILQQAGTSVLAQANQVPQNVLSLLREFSLLTEVETPIRNEWGSRSNDSSDPLESLLTEVETPIRNEWGSRSNDSSDPGSSLLTEVETPIRNEWGSRSNDSSDPELSLLTEVETPIRNEWGSRSNDSSDPSR

SEQ ID NO: 588 - DNA, 1203 bp, Artificial Sequence
  pMT/STF2delta.4XM2e (H1)
atgtgcatattactggccgtcgtggcctttgttggcctctcgctcgggagatctgcacaagtaatcaacactaacagtctgtcgctgctgacccagaataacctgaacaaatcccagtccgcactgggcaccgctatcgagcgtctgtcttctggtctgcgtatcaacagcgcgaaagacgatgcggcaggtcaggcgattgctaaccgtttcaccgcgaacatcaaaggtctgactcaggcttcccgtaacgctaacgacggtatctccattgcgcagaccactgaaggcgcgctgaacgaaatcaacaacaacctgcagcgtgtgcgtgaactggcggttcagtctgctaacagcaccaactcccagtctgacctcgactccatccaggctgaaatcacccagcgcctgaacgaaatcgaccgtgtatccggccagactcagttcaacggcgtgaaagtcctggcgcaggacaacaccctgaccatccaggttggcgccaacgacggtgaaactatcgatatcgatctgaagcagatcaactctcagaccctgggtctggactcactgaacgtgcatggagcgccggtggatcctgctagcccatggaccgaaaacccgctgcagaaaattgatgccgcgctggcgcaggtggatgcgctgcgctctgatctgggtgcggtacaaaaccgtttcaactctgctatcaccaacctgggcaataccgtaaacaatctgtctgaagcgcgtagccgtatcgaagattccgactacgcgaccgaagtttccaacatgtctcgcgcgcagattttgcagcaggccggtacttccgttctggcgcaggctaaccaggtcccgcagaacgtgctgtctctgttacgtgaattcagcttgctgactgaggttgagaccccgattcgcaacgaatggggttcccgttccaacgattcttccgacccgctcgagagcctgttgaccgaggttgaaacccctatccgtaatgaatggggctcccgtagcaacgactcttctgacccaggatcctccctcttgaccgaagtggaaacgcctattcgtaatgagtggggttctcgtagcaatgacagctcggacccggagctctcgctgctgacggaagtggagactccgatccgtaacgagtggggctctcgctctaacgatagctcagacccgtctagataa

SEQ ID NO: 589 - protein, 402 aa, Artificial Sequence
  pMT/STF2delta.4XM2e (H5)
MKLCILLAVVAFVGLSLGRSAQVINTNSLSLLTQNNLNKSQSALGTAIERLSSGLRINSAKDDAAGQAIANRFTANIKGLTQASRNANDGISIAQTTEGALNEINNNLQRVRELAVQSANSTNSQSDLDSIQAEITQRLNEIDRVSGQTQFNGVKVLAQDNTLTIQVGANDGETIDIDLKQINSQTLGLDSLNVHGAPVDPASPWTENPLQKIDAALAQVDALRSDLGAVQNRFNSAITNLGNTVNNLSEARSRIEDSDYATEVSNMSRAQILQQAGTSVLAQANQVPQNVLSLLREFSLLTEVETPTRNEWESRSSDSSDPLESLLTEVETPTRNEWESRSSDSSDPESSLLTEVETPTRNEWESRSSDSSDPGSSLLTEVETPTRNEWESRSSDSSDPSR

SEQ ID NO: 590 - DNA, 1206 bp, Artificial Sequence
  pMT/STF2delta.4XM2e (H5)
atgtgcatattactggccgtcgtggcctttgttggcctctcgctcgggagatctgcacaagtaatcaacactaacagtctgtcgctgctgacccagaataacctgaacaaatcccagtccgcactgggcaccgctatcgagcgtctgtcttctggtctgcgtatcaacagcgcgaaagacgatgcggcaggtcaggcgattgctaaccgtttcaccgcgaacatcaaaggtctgactcaggcttcccgtaacgctaacgacggtatctccattgcgcagaccactgaaggcgcgctgaacgaaatcaacaacaacctgcagcgtgtgcgtgaactggcggttcagtctgctaacagcaccaactcccagtctgacctcgactccatccaggctgaaatcacccagcgcctgaacgaaatcgaccgtgtatccggccagactcagttcaacggcgtgaaagtcctggcgcaggacaacaccctgaccatccaggttggcgccaacgacggtgaaactatcgatatcgatctgaagcagatcaactctcagaccctgggtctggactcactgaacgtgcatggagcgccggtggatcctgctagcccatggaccgaaaacccgctgcagaaaattgatgccgcgctggcgcaggtggatgcgctgcgctctgatctgggtgcggtacaaaaccgtttcaactctgctatcaccaacctgggcaataccgtaaacaatctgtctgaagcgcgtagccgtatcgaagattccgactacgcgaccgaagtttccaacatgtctcgcgcgcagattttgcagcaggccggtacttccgttctggcgcaggctaaccaggtcccgcagaacgtgctgtctctgttacgtgaattctctctgctgactgaagtagaaactccaacgcgtaatgaatgggaatcccgttctagcgactcctctgatcctctcgagtccctgctgacggaggttgaaaccccgacccgcaacgagtgggaaagccgttcctccgattcctctgatccggagagcagcctgctgaccgaggtagaaaccccgacccgtaatgagtgggaatctcgctcctctgattcttctgacccgggatcctctctgctgaccgaagtggagactccgactcgcaacgaatgggagagccgttcttctgactcctctgacccgtctagataataa

SEQ ID NO: 591 - protein, 508 aa, Artificial Sequence
  pMT/STF2delta.4XM2e (H1H5)
MKLCILLAVVAFVGLSLGRSAQVINTNSLSLLTQNNLNKSQSALGTAIERLSSGLRINSAKDDAAGQAIANRFTANIKGLTQASRNANDGISIAQTTEGALNEINNNLQRVRELAVQSANSTNSQSDLDSIQAEITQRLNEIDRVSGQTQFNGVKVLAQDNTLTIQVGANDGETIDIDLKQINSQTLGLDSLNVHGAPVDPASPWTENPLQKIDAALAQVDALRSDLGAVQNRFNSAITNLGNTVNNLSEARSRIEDSDYATEVSNMSRAQILQQAGTSVLAQANQVPQNVLSLLREFSLLTEVETPIRNEWGSRSNDSSDPLESLLTEVETPIRNEWGSRSNDSSDPGSSLLTEVETPIRNEWGSRSNDSSDPELSLLTEVETPIRNEWGSRSNDSSDPSRQFSLLTEVETPTRNEWESRSSDSSDPLESLLTEVETPTRNEWESRSSDSSDPESSLLTEVETPTRNEWESRSSDSSDPGSSLLTEVETPTRNEWESRSSDSSDPSR

SEQ ID NO: 592 - DNA, 1527 bp, Artificial Sequence
  pMT/STF2delta.4XM2e (H1H5)
atgtgcatattactggccgtcgtggcctttgttggcctctcgctcgggagatctgcacaagtaatcaacactaacagtctgtcgctgctgacccagaataacctgaacaaatcccagtccgcactgggcaccgctatcgagcgtctgtcttctggtctgcgtatcaacagcgcgaaagacgatgcggcaggtcaggcgattgctaaccgtttcaccgcgaacatcaaaggtctgactcaggcttcccgtaacgctaacgacggtatctccattgcgcagaccactgaaggcgcgctgaacgaaatcaacaacaacctgcagcgtgtgcgtgaactggcggttcagtctgctaacagcaccaactcccagtctgacctcgactccatccaggctgaaatcacccagcgcctgaacgaaatcgaccgtgtatccggccagactcagttcaacggcgtgaaagtcctggcgcaggacaacaccctgaccatccaggttggcgccaacgacggtgaaactatcgatatcgatctgaagcagatcaactctcagaccctgggtctggactcactgaacgtgcatggagcgccggtggatcctgctagcccatggaccgaaaacccgctgcagaaaattgatgccgcgctggcgcaggtggatgcgctgcgctctgatctgggtgcggtacaaaaccgtttcaactctgctatcaccaacctgggcaataccgtaaacaatctgtctgaagcgcgtagccgtatcgaagattccgactacgcgaccgaagtttccaacatgtctcgcgcgcagattttgcagcaggccggtacttccgttctggcgcaggctaaccaggtcccgcagaacgtgctgtctctgttacgtgaattcagcttgctgactgaggttgagaccccgattcgcaacgaatggggttcccgttccaacgattcttccgacccgctcgagagcctgttgaccgaggttgaaacccctatccgtaatgaatggggctcccgtagcaacgactcttctgacccaggatcctccctcttgaccgaagtggaaacgcctattcgtaatgagtggggttctcgtagcaatgacagctcggacccggagctctcgctgctgacggaagtggagactccgatccgtaacgagtggggctctcgctctaacgatagctcagacccgtctagatctagagaattctctctgctgactgaagtagaaactccaacgcgtaatgaatgggaatcccgttctagcgactcctctgatcctctcgagtccctgctgacggaggttgaaaccccgacccgcaacgagtgggaaagccgttcctccgattcctctgatccggagagcagcctgctgaccgaggtagaaaccccgacccgtaatgagtgggaatctcgctcctctgattcttctgacccgggatcctctctgctgaccgaagtggagactccgactcgcaacgaatgggagagccgttcttctgactcctctgacccgtctagataa

SEQ ID NO: 593 - DNA, 33 bp, Artificial Sequence
  M2
gaggttgagaccccgattcgcaacgaatggggt

SEQ ID NO: 594 - protein, 10 aa, Artificial Sequence
  Linker
GAPVDPASPW

SEQ ID NO: 595 - protein, 277 aa, Artificial Sequence
  S. muenchen
MAQVINTNSLSLLTQNNLNKSQSALGTAIERLSSGLRINSAKDDAAGQAIANRFTANIKGLTQASRNANDGISIAQTTEGALNEINNNLQRVRELAVQSANGTNSQSDLDSIQAEITQRLNEIDRVSGQTQFNGVKVLAQDNTLTIQVGANDGETIDIDLKEISSKTLDKHNFRTGGELKEVNTDKTENPLQKIDAALAQVDTLRSDLGAVQNRFNSAITNLGNTVNNLSSARSRIEDSDYATEVSNMSRAQILQQAGTSVLAQANQVPQNVLSLLR

SEQ ID NO: 596 - DNA, 789 bp, Artificial Sequence
  S. muenchen
atggcacaagtcattaatacaaacagcctgtcgctgttgacccagaataacctgaacaaatcccagtccgctctgggcaccgctatcgagcgtctgtcttccggtctgcgtatcaacagcgcgaaagacgatgcggcaggtcaggcgattgctaaccgtttcaccgcgaacatcaaaggtctgactcaggcttcccgtaacgctaacgacggtatctccattgcgcagaccactgaaggcgcgctgaacgaaatcaacaacaacctgcagcgtgtgcgtgaactggcggttcagtctgctaacggtactaactcccagtctgaccttgactctatccaggctgaaatcacccagcgtctgaacgaaatcgaccgtgtatccggtcagactcagttcaacggcgtgaaagtcctggcgcaggacaacaccctgaccatccaggttggtgccaacgacggtgaaactattgatattgatttaaaagaaattagctctaaaacactgacagataagactgaaaacccactgcagaaaattgatgctgccttggcacaggttgatacacttcgttctgacctgggtgcggtacagaaccgtttcaactccgctatcaccaacctgggcaataccgtaaataacctgtcttctgcccgtagccgtatcgaagattccgactacgcgaccgaagtctccaacatgtctcgcgcgcagattctgcagcaggccggtacctccgttctggcgcaggctaaccaggttccgcaaaacgtcctctctttactgcgttaa

SEQ ID NO: 597 - protein, 102 aa, Artificial Sequence
  H1 and H5
SLLTEVETPTRNEWESRSSDSSDPLESLLTEVETPTRNEWESRSSDSSDPESSLLTEVETPTRNEWESRSSDSSDPGSSLLTEVETPTRNEWESRSSDSSDP

SEQ ID NO: 598 - DNA, 306 bp, Artificial Sequence
  H1 and H5
tctctgctgactgaagtagaaactccaacgcgtaatgaatgggaatcccgttctagcgactcctctgatcctctcgagtccctgctgacggaggttgaaaccccgacccgcaacgagtgggaaagccgttcctccgattcctctgatccggagagcagcctgctgaccgaggtagaaaccccgacccgtaatgagtgggaatctcgctcctctgattcttctgacccgggatcctctctgctgaccgaagtggagactccgactcgcaacgaatgggagagccgttcttctgactcctctgacccg

SEQ ID NO: 599 - protein, 20 aa, Artificial Sequence
  HA
PAKLLKERGFFGAIAGFLEE

SEQ ID NO: 600 - protein, 20 aa, Artificial Sequence
  HA
NIPSIQSRGLFGAIAGFIEE

SEQ ID NO: 601 - protein, 20 aa, Artificial Sequence
  HA
NVPEKQTRGIFGAIAGFIEE

SEQ ID NO: 602 - protein, 20 aa, Artificial Sequence
  HA
RERRRKKRGLFGAIAGFIEE

SEQ ID NO: 603 - DNA, 72 bp, Artificial Sequence
  M2
agcttgctgactgaggttgagaccccgattcgcaacgaatggggttcccgttccaacgattcttccgacccg

SEQ ID NO: 604 - protein, 506 aa, S. typhimurium; identical to SEQ ID NO: 312

SEQ ID NO: 605 - DNA, 1517 bp, S. typhimurium
tggcacaagtaatcaacactaacagtctgtcgctgctgacccagaataacctgaacaaatcccagtccgcactgggcaccgctatcgagcgtctgtcttctggtctgcgtatcaacagcgcgaaagacgatgcggcaggtcaggcgattgctaaccgtttcaccgcgaacatcaaaggtctgactcaggcttcccgtaacgctaacgacggtatctccattgcgcagaccactgaaggcgcgctgaacgaaatcaacaacaacctgcagcgtgtgcgtgaactggcggttcagtctgctaacagcaccaactcccagtctgacctcgactccatccaggctgaaatcacccagcgcctgaacgaaatcgaccgtgtatccggccagactcagttcaacggcgtgaaagtcctggcgcaggacaacaccctgaccatccaggttggcgccaacgacggtgaaactatcgatatcgatctgaagcagatcaactctcagaccctgggtctggactcactgaacgtgcagaaagcgtatgatgtgaaagatacagcagtaacaacgaaagcttatgccaataatggtactacactggatgtatcgggtcttgatgatgcagctattaaagcggctacgggtggtacgaatggtacggcttctgtaaccggtggtgcggttaaatttgacgcagataataacaagtactttgttactattggtggctttactggtgctgatgccgccaaaaatggcgattatgaagttaacgttgctactgacggtacagtaacccttgcggctggcgcaactaaaaccacaatgcctgctggtgcgacaactaaaacagaagtacaggagttaaaagatacaccggcagttgtttcagcagatgctaaaaatgccttaattgctggcggcgttgacgctaccgatgctaatggcgctgagttggtcaaaatgtcttataccgataaaaatggtaagacaattgaaggcggttatgcgcttaaagctggcgataagtattacgccgcagattacgatgaagcgacaggagcaattaaagctaaaactacaagttatactgctgctgacggcactaccaaaacagcggctaaccaactgggtggcgtagacggtaaaaccgaagtcgttactatcgacggtaaaacctacaatgccagcaaagccgctggtcatgatttcaaagcacaaccagagctggcggaagcagccgctaaaaccaccgaaaacccgctgcagaaaattgatgccgcgctggcgcaggtggatgcgctgcgctctgatctgggtgcggtacaaaaccgtttcaactctgctatcaccaacctgggcaataccgtaaacaatctgtctgaagcgcgtagccgtatcgaagattccgactacgcgaccgaagtttccaacatgtctcgcgcgcagattctgcagcaggccggtacttccgttctggcgcaggctaaccaggtcccgcagaacgtgctgtctctgttacgt

SEQ ID NO: 606 - protein, 277 aa, S. typhimurium; identical to SEQ ID NO: 313

SEQ ID NO: 607 - DNA, 832 bp, S. typhimurium; identical to SEQ ID NO: 501

SEQ ID NO: 608 - DNA, 1215 bp, Artificial Sequence
  pET/STF2delta.JEIII+
atggcacaagtaatcaacactaacagtctgtcgctgctgacccagaataacctgaacaaatcccagtccgcactgggcaccgctatcgagcgtctgtcttctggtctgcgtatcaacagcgcgaaagacgatgcggcaggtcaggcgattgctaaccgtttcaccgcgaacatcaaaggtctgactcaggcttcccgtaacgctaacgacggtatctccattgcgcagaccactgaaggcgcgctgaacgaaatcaacaacaacctgcagcgtgtgcgtgaactggcggttcagtctgctaacagcaccaactcccagtctgacctcgactccatccaggctgaaatcacccagcgcctgaacgaaatcgaccgtgtatccggccagactcagttcaacggcgtgaaagtcctggcgcaggacaacaccctgaccatccaggttggcgccaacgacggtgaaactatcgatatcgatctgaagcagatcaactctcagaccctgggtctggactcactgaacgtgcatggagcgccggtggatcctgctagcccatggaccgaaaacccgctgcagaaaattgatgccgcgctggcgcaggtggatgcgctgcgctctgatctgggtgcggtacaaaaccgtttcaactctgctatcaccaacctgggcaataccgtaaacaatctgtctgaagcgcgtagccgtatcgaagattccgactacgcgaccgaagtttccaacatgtctcgcgcgcagattttgcagcaggccggtacttccgttctggcgcaggctaaccaggtcccgcagaacgtgctgtctctgttacgtgaattctgcagatatccagcacagtggcggccgctcatggacaaactggctctgaaaggcacaacctatggcatgtgtacagaaaaattctcgttcgcgaaaaatccggtggacactggtcacggaacagttgtcattgaactctcctactctgggagtgatggcccctgcaaaattccgattgtttccgttgcgagcctcaatgacatgacccccgttgggcggctggtgacagtgaaccccttcgtcgcgacttccagtgccaactcaaaggtgctggtcgagatggaaccccccttcggagactcctacatcgtagttggaaggggagacaagcagatcaaccaccattggcacaaagctggaagcacgctgggcaaggcc

SEQ ID NO: 609 - protein, 405 aa, Artificial Sequence
  pET/STF2delta.JEIII+
MAQVINTNSLSLLTQNNLNKSQSALGTAIERLSSGLRINSAKDDAAGQAIANRFTANIKGLTQASRNANDGISIAQTTEGALNEINNNLQRVRELAVQSANSTNSQSDLDSIQAEITQRLNEIDRVSGQTQFNGVKVLAQDNTLTIQVGANDGETIDIDLKQINSQTLGLDSLNVHGAPVDPASPWTENPLQKIDAALAQVDALRSDLGAVQNRFNSAITNLGNTVNNLSEARSRIEDSDYATEVSNMSRAQILQQAGTSVLAQANQVPQNVLSLLREFCRYPAQWRPLMDKLALKGTTYGMCTEKFSFAKNPVDTGHGTVVIELSYSGSDGPCKIPIVSVASLNDMTPVGRLVTVNPFVATSSANSKVLVEMEPPFGDSYIVVGRGDKQINHHWHKAGSTLGKA

SEQ ID NO: 610 - protein, 115 aa, Artificial Sequence
  West Nile domain III
MEKLQLKGTTYGVCSKAFKFLGTPADTGHGTVVLELQYTGTDGPCKVPISSVASLNDLTPVGRLVTVNPFVSVATANAKVLIELEPPFGDSYIVVGRGEQQINHHWHKSGSSIGK

SEQ ID NO: 611 - protein, 103 aa, Artificial Sequence
  West Nile domain III
GTTYGVCSKAFKFARTPADTGHGTVVLELQYTGKDGPCKVPISSVASLNDLTPVGRLVTVNPFVSVATANSKVLIELEPPFGDSYIVVGRGEQQINHHWHKSG

SEQ ID NO: 612 - protein, 102 aa, Artificial Sequence
  West Nile domain III
GTTYGVCSKAFKFLGTPADTGHGTVVLELQYTGTDGPCKVPISSVASLNDLTPVGRLVTVNPFVSVATANAKVLIELEPPFGDSYVVGRGEQQINHHWHKSG

SEQ ID NO: 613 - protein, 27 aa, Artificial Sequence
  West Nile domain III
ELEPPFGDSYIVVGRGEQQINHHWHKS

SEQ ID NO: 614 - DNA, 345 bp, Artificial Sequence
  West Nile domain III
atggaaaaattgcagttgaagggaacaacctatggcgtctgttcaaaggctttcaagtttcttgggactcccgcagacacaggtcacggcactgtggtgttggaattgcagtacactggcacggatggaccttgcaaagttcctatctcgtcagtggcttcattgaacgacctaacgccagtgggcagattggtcactgtcaacccttttgtttcagtggccacggccaacgctaaggtcctgattgaattggaaccaccctttggagactcatacatagtggtgggcagaggagaacaacagatcaatcaccattggcacaagtctggaagcagcattggcaaa

SEQ ID NO: 615 - protein, 96 aa, Artificial Sequence
  Langat virus
GLTYTVCDKTKFTWKRAPTDSGHDTVVMEVGFSGTRPCRIPVRAVAHGVPEVNVAMLITPNPTMENNGGGFIEMQLPPGDNIIYVGDLNHQWFQKG

SEQ ID NO: 616 - protein, 103 aa, Artificial Sequence
  Kunjin virus
GTTYGVCSKAFRFLGTPADTGHGTVVLELQYTGTDGPCKIPISSVASLNDLTPVGRLVTVNPFVSVSTANAKVLIELEPPFGDSYIVVGRGEQQINHHWHKSG

SEQ ID NO: 617 - protein, 103 aa, Artificial Sequence
  Murray Valley virus
GTTYGMCTEKFTFSKNPADTGHGTVVLELQYTGSDGPCKIPISSVASLNDMTPVGRMVTANPYVASSTANAKVLVEIEPPFGDSYIVVGRGDKQINHHWHKEG

SEQ ID NO: 618 - protein, 103 aa, Artificial Sequence
  Japanese encephalitis virus
GTTYGMCTEKFSFAKNPADTGHGTVVIELSYSGSDGPCKIPIVSVASLNDMTPVGRLVTVNPFVATSSANSKVLVEMEPPFGSDYIVVGMGDKQINHHWHKAG

SEQ ID NO: 619 - protein, 26 aa, Artificial Sequence
  Japanese encephalitis virus
EMEPPFGDSYIVVMGDKQINHHWHKA

SEQ ID NO: 620 - protein, 95 aa, Artificial Sequence
  Tick-borne encephalitis virus
GLTYTMCDKTKFTWKRAPTDSGHDTVVMEVTFSGTKPCRIPVRAVAHGSPDVNVAMLITPNPTIENNGGGFIEMQLPPGDNIIYVGELSHQWFQK

SEQ ID NO: 621 - protein, 94 aa, Artificial Sequence
  Yellow fever virus
GLTYTMCDKTFTWKRAPTDSGHDTVVMEVTFSGTKPCRIPVRAVAHGSPDVNVAMLITPNPTIENNGGGFIEMQLPPGDNIIYVGELSHQWFQK

SEQ ID NO: 622 - protein, 95 aa, Artificial Sequence
  Envelope protein flavivirus
GTTYGMCSKKFTFRPADTGHGTVVLELQYSGDGPCKIPISVASKNDLTPVGRLVTVNPFVSSTANAKVLIEMEPPFGDSYIVVGGEQINHHWHKG

SEQ ID NO: 623 - protein, 27 aa, Artificial Sequence
  Dengue virus
EAEPPFGESYIVVGAGEKALKLSWFKK

SEQ ID NO: 624 - protein, 27 aa, Artificial Sequence
  Dengue virus
ETEPPFGESYIVVGAGEKALKLSWFKK

SEQ ID NO: 625 - protein, 27 aa, Artificial Sequence
  Dengue virus
EAEPPFGDSYIIIGVEPQQLKLNWFKK

SEQ ID NO: 626 - protein, 27 aa, Artificial Sequence
  Dengue virus
EAEPPFGESNIVIGIGDKALKINWYKK

SEQ ID NO: 627 - protein, 27 aa, Artificial Sequence
  Dengue virus
ELEPPFGESYIVIGVGNSALTLHWFRK

SEQ ID NO: 628 - DNA, 48 bp, Artificial Sequence; identical to SEQ ID NO: 520
  Linker

SEQ ID NO: 629 - protein, 16 aa, Artificial Sequence
  Linker
KGNSKLEGQLEFPRTS

SEQ ID NO: 630 - DNA, 36 bp, Artificial Sequence; identical to SEQ ID NO: 522
  Linker

SEQ ID NO: 631 - protein, 12 aa, Artificial Sequence
  Linker
EFCRYPAQWRPL

SEQ ID NO: 632 - DNA, 1863 bp, Artificial Sequence
  STF2.EIII+
atggcacaagtaatcaacactaacagtctgtcgctgctgacccagaataacctgaacaaatcccagtccgcactgggcaccgctatcgagcgtctgtcttctggtctgcgtatcaacagcgcgaaagacgatgcggcaggtcaggcgattgctaaccgtttcaccgcgaacatcaaaggtctgactcaggcttcccgtaacgctaacgacggtatctccattgcgcagaccactgaaggcgcgctgaacgaaatcaacaacaacctgcagcgtgtgcgtgaactggcggttcagtctgctaacagcaccaactcccagtctgacctcgactccatccaggctgaaatcacccagcgcctgaacgaaatcgaccgtgtatccggccagactcagttcaacggcgtgaaagtcctggcgcaggacaacaccctgaccatccaggttggcgccaacgacggtgaaactatcgatatcgatctgaagcagatcaactctcagaccctgggtctggactcactgaacgtgcagaaagcgtatgatgtgaaagatacagcagtaacaacgaaagcttatgccaataatggtactacactggatgtatcgggtcttgatgatgcagctattaaagcggctacgggtggtacgaatggtacggcttctgtaaccggtggtgcggttaaatttgacgcagataataacaagtactttgttactattggtggctttactggtgctgatgccgccaaaaatggcgattatgaagttaacgttgctactgacggtacagtaacccttgcggctggcgcaactaaaaccacaatgcctgctggtgcgacaactaaaacagaagtacaggagttaaaagatacaccggcagttgtttcagcagatgctaaaaatgccttaattgctggcggcgttgacgctaccgatgctaatggcgctgagttggtcaaaatgtcttataccgataaaaatggtaagacaattgaaggcggttatgcgcttaaagctggcgataagtattacgccgcagattacgatgaagcgacaggagcaattaaagctaaaactacaagttatactgctgctgacggcactaccaaaacagcggctaaccaactgggtggcgtagacggtaaaaccgaagtcgttactatcgacggtaaaacctacaatgccagcaaagccgctggtcatgatttcaaagcacaaccagagctggcggaagcagccgctaaaaccaccgaaaacccgctgcagaaaattgatgccgcgctggcgcaggtggatgcgctgcgctctgatctgggtgcggtacaaaaccgtttcaactctgctatcaccaacctgggcaataccgtaaacaatctgtctgaagcgcgtagccgtatcgaagattccgactacgcgaccgaagtttccaacatgtctcgcgcgcagattctgcagcaggccggtacttccgttctggcgcaggctaaccaggtcccgcagaacgtgctgtctctgttacgtatggaaaaattgcagttgaagggaacaacctatggcgtctgttcaaaggctttcaagtttcttgggactcccgcagacacaggtcacggcactgtggtgttggaattgcagtacactggcacggatggaccttgcaaagttcctatctcgtcagtggcttcattgaacgacctaacgccagtgggcagattggtcactgtcaacccttttgtttcagtggccacggccaacgctaaggtcctgattgaattggaaccaccctttggagactcatacatagtggtgggcagaggagaacaacagatcaatcaccattggcacaagtctggaagcagcattggcaaa

SEQ ID NO: 633 - protein, 621 aa, Artificial Sequence
  STF2.EIII+
MAQVINTNSLSLLTQNNLNKSQSALGTAIERLSSGLRINSAKDDAAGQAIANRFTANIKGLTQASRNANDGISIAQTTEGALNEINNNLQRVRELAVQSANSTNSQSDLDSIQAEITQRLNEIDRVSGQTQFNGVKVLAQDNTLTIQVGANDGETIDIDLKQINSQTLGLDSLNVQKAYDVKDTAVTTKAYANNGTTLDVSGLDDAAIKAATGGTNGTASVTGGAVKFDADNNKYFVTIGGFTGADAAKNGDYEVNVATDGTVTLAAGATKTTMPAGATTKTEVQELKDTPAVVSADAKNALIAGGVDATDANGAELVKMSYTDKNGKTIEGGYALKAGDKYYAADYDEATGAIKAKTTSYTAADGTTKTAANQLGGVDGKTEVVTIDGKTYNASKAAGHDFKAQPELAEAAAKTTENPLQKIDAALAQVDALRSDLGAVQNRFNSAITNLGNTVNNLSEARSRIEDSDYATEVSNMSRAQILQQAGTSVLAQANQVPQNVLSLLRMEKLQLKGTTYGVCSKAFKFLGTPADTGHGTVVLELQYTGTDGPCKVPISSVASLNDLTPVGRLVTVNPFVSVATANAKVLIELEPPFGDSYIVVGRGEQQINHHWHKSGSSIGK

SEQ ID NO: 634 - DNA, 1176 bp, Artificial Sequence
  STF2delta.EIII+
atggcacaagtaatcaacactaacagtctgtcgctgctgacccagaataacctgaacaaatcccagtccgcactgggcaccgctatcgagcgtctgtcttctggtctgcgtatcaacagcgcgaaagacgatgcggcaggtcaggcgattgctaaccgtttcaccgcgaacatcaaaggtctgactcaggcttcccgtaacgctaacgacggtatctccattgcgcagaccactgaaggcgcgctgaacgaaatcaacaacaacctgcagcgtgtgcgtgaactggcggttcagtctgctaacagcaccaactcccagtctgacctcgactccatccaggctgaaatcacccagcgcctgaacgaaatcgaccgtgtatccggccagactcagttcaacggcgtgaaagtcctggcgcaggacaacaccctgaccatccaggttggcgccaacgacggtgaaactatcgatatcgatctgaagcagatcaactctcagaccctgggtctggactcactgaacgtgcatggagcgccggtggatcctgctagcccatggaccgaaaacccgctgcagaaaattgatgccgcgctggcgcaggtggatgcgctgcgctctgatctgggtgcggtacaaaaccgtttcaactctgctatcaccaacctgggcaataccgtaaacaatctgtctgaagcgcgtagccgtatcgaagattccgactacgcgaccgaagtttccaacatgtctcgcgcgcagattttgcagcaggccggtacttccgttctggcgcaggctaaccaggtcccgcagaacgtgctgtctctgttacgtatggaaaaattgcagttgaagggaacaacctatggcgtctgttcaaaggctttcaagtttcttgggactcccgcagacacaggtcacggcactgtggtgttggaattgcagtacactggcacggatggaccttgcaaagttcctatctcgtcagtggcttcattgaacgacctaacgccagtgggcagattggtcactgtcaacccttttgtttcagtggccacggccaacgctaaggtcctgattgaattggaaccaccctttggagactcatacatagtggtgggcagaggagaacaacagatcaatcaccattggcacaagtctggaagcagcattggcaaa

SEQ ID NO: 635 - protein, 392 aa, Artificial Sequence
  STF2delta.EIII+
MAQVINTNSLSLLTQNNLNKSQSALGTAIERLSSGLRINSAKDDAAGQAIANRFTANIKGLTQASRNANDGISIAQTTEGALNEINNNLQRVRELAVQSANSTNSQSDLDSIQAEITQRLNEIDRVSGQTQFNGVKVLAQDNTLTIQVGANDGETIDIDLKQINSQTLGLDSLNVHGAPVDPASPWTENPLQKIDAALAQVDALRSDLGAVQNRFNSAITNLGNTVNNLSEARSRIEDSDYATEVSNMSRAQILQQAGTSVLAQANQVPQNVLSLLRMEKLQLKGTTYGVCSKAFKFLGTPADTGHGTVVLELQYTGTDGPCKVPISSVASLNDLTPVGRLVTVNPFVSVATANAKVLIELEPPFGDSYIVVGRGEQQINHHWHKSGSSIGK

SEQ ID NO: 636 - DNA, 1224 bp, Artificial Sequence
  STF2delta.EIII+
atggcacaagtaatcaacactaacagtctgtcgctgctgacccagaataacctgaacaaatcccagtccgcactgggcaccgctatcgagcgtctgtcttctggtctgcgtatcaacagcgcgaaagacgatgcggcaggtcaggcgattgctaaccgtttcaccgcgaacatcaaaggtctgactcaggcttcccgtaacgctaacgacggtatctccattgcgcagaccactgaaggcgcgctgaacgaaatcaacaacaacctgcagcgtgtgcgtgaactggcggttcagtctgctaacagcaccaactcccagtctgacctcgactccatccaggctgaaatcacccagcgcctgaacgaaatcgaccgtgtatccggccagactcagttcaacggcgtgaaagtcctggcgcaggacaacaccctgaccatccaggttggcgccaacgacggtgaaactatcgatatcgatctgaagcagatcaactctcagaccctgggtctggactcactgaacgtgcatggagcgccggtggatcctgctagcccatggaccgaaaacccgctgcagaaaattgatgccgcgctggcgcaggtggatgcgctgcgctctgatctgggtgcggtacaaaaccgtttcaactctgctatcaccaacctgggcaataccgtaaacaatctgtctgaagcgcgtagccgtatcgaagattccgactacgcgaccgaagtttccaacatgtctcgcgcgcagattttgcagcaggccggtacttccgttctggcgcaggctaaccaggtcccgcagaacgtgctgtctctgttacgtgaattctgcagatatccagcacagtggcggccgctcatggaaaaattgcagttgaagggaacaacctatggcgtctgttcaaaggctttcaagtttcttgggactcccgcagacacaggtcacggcactgtggtgttggaattgcagtacactggcacggatggaccttgcaaagttcctatctcgtcagtggcttcattgaacgacctaacgccagtgggcagattggtcactgtcaacccttttgtttcagtggccacggccaacgctaaggtcctgattgaattggaaccaccctttggagactcatacatagtggtgggcagaggagaacaacagatcaatcaccattggcacaagtctggaagcagcattggcaaacccttaataagc

SEQ ID NO: 637 - protein, 408 aa, Artificial Sequence
  STF2delta.EIII+
MAQVINTNSLSLLTQNNLNKSQSALGTAIERLSSGLRINSAKDDAAGQAIANRFTANIKGLTQASRNANDGISIAQTTEGALNEINNNLQRVRELAVQSANSTNSQSDLDSIQAEITQRLNEIDRVSGQTQFNGVKVLAQDNTLTIQVGANDGETIDIDLKQINSQTLGLDSLNVHGAPVDPASPWTENPLQKIDAALAQVDALRSDLGAVQNRFNSAITNLGNTVNNLSEARSRIEDSDYATEVSNMSRAQILQQAGTSVLAQANQVPQNVLSLLREFCRYPAQWRPLMEKLQLKGTTYGVCSKAFKFLGTPADTGHGTVVLELQYTGTDGPCKVPISSVASLNDLTPVGRLVTVNPFVSVATANAKVLIELEPPFGDSYIVVGRGEQQINHHWHKSGSSIGKPLIS

SEQ ID NO: 638 - DNA, 1899 bp, Artificial Sequence
  STF2.EIII+
atggcacaagtaatcaacactaacagtctgtcgctgctgacccagaataacctgaacaaatcccagtccgcactgggcaccgctatcgagcgtctgtcttctggtctgcgtatcaacagcgcgaaagacgatgcggcaggtcaggcgattgctaaccgtttcaccgcgaacatcaaaggtctgactcaggcttcccgtaacgctaacgacggtatctccattgcgcagaccactgaaggcgcgctgaacgaaatcaacaacaacctgcagcgtgtgcgtgaactggcggttcagtctgctaacagcaccaactcccagtctgacctcgactccatccaggctgaaatcacccagcgcctgaacgaaatcgaccgtgtatccggccagactcagttcaacggcgtgaaagtcctggcgcaggacaacaccctgaccatccaggttggcgccaacgacggtgaaactatcgatatcgatctgaagcagatcaactctcagaccctgggtctggactcactgaacgtgcagaaagcgtatgatgtgaaagatacagcagtaacaacgaaagcttatgccaataatggtactacactggatgtatcgggtcttgatgatgcagctattaaagcggctacgggtggtacgaatggtacggcttctgtaaccggtggtgcggttaaatttgacgcagataataacaagtactttgttactattggtggctttactggtgctgatgccgccaaaaatggcgattatgaagttaacgttgctactgacggtacagtaacccttgcggctggcgcaactaaaaccacaatgcctgctggtgcgacaactaaaacagaagtacaggagttaaaagatacaccggcagttgtttcagcagatgctaaaaatgccttaattgctggcggcgttgacgctaccgatgctaatggcgctgagttggtcaaaatgtcttataccgataaaaatggtaagacaattgaaggcggttatgcgcttaaagctggcgataagtattacgccgcagattacgatgaagcgacaggagcaattaaagctaaaactacaagttatactgctgctgacggcactaccaaaacagcggctaaccaactgggtggcgtagacggtaaaaccgaagtcgttactatcgacggtaaaacctacaatgccagcaaagccgctggtcatgatttcaaagcacaaccagagctggcggaagcagccgctaaaaccaccgaaaacccgctgcagaaaattgatgccgcgctggcgcaggtggatgcgctgcgctctgatctgggtgcggtacaaaaccgtttcaactctgctatcaccaacctgggcaataccgtaaacaatctgtctgaagcgcgtagccgtatcgaagattccgactacgcgaccgaagtttccaacatgtctcgcgcgcagattctgcagcaggccggtacttccgttctggcgcaggctaaccaggtcccgcagaacgtgctgtctctgttacgtgaattctgcagatatccagcacagtggcggccgctcatggaaaaattgcagttgaagggaacaacctatggcgtctgttcaaaggctttcaagtttcttgggactcccgcagacacaggtcacggcactgtggtgttggaattgcagtacactggcacggatggaccttgcaaagttcctatctcgtcagtggcttcattgaacgacctaacgccagtgggcagattggtcactgtcaacccttttgtttcagtggccacggccaacgctaaggtcctgattgaattggaaccaccctttggagactcatacatagtggtgggcagaggagaacaacagatcaatcaccattggcacaagtctggaagcagcattggcaaa

SEQ ID NO: 639 - protein, 633 aa, Artificial Sequence
  STF2.EIII+
MAQVINTNSLSLLTQNNLNKSQSALGTAIERLSSGLRINSAKDDAAGQAIANRFTANIKGLTQASRNANDGISIAQTTEGALNEINNNLQRVRELAVQSANSTNSQSDLDSIQAEITQRLNEIDRVSGQTQFNGVKVLAQDNTLTIQVGANDGETIDIDLKQINSQTLGLDSLNVQKAYDVKDTAVTTKAYANNGTTLDVSGLDDAAIKAATGGTNGTASVTGGAVKFDADNNKYFVTIGGFTGADAAKNGDYEVNVATDGTVTLAAGATKTTMPAGATTKTEVQELKDTPAVVSADAKNALIAGGVDATDANGAELVKMSYTDKNGKTIEGGYALKAGDKYYAADYDEATGAIKAKTTSYTAADGTTKTAANQLGGVDGKTEVVTIDGKTYNASKAAGHDFKAQPELAEAAAKTTENPLQKIDAALAQVDALRSDLGAVQNRFNSAITNLGNTVNNLSEARSRIEDSDYATEVSNMSRAQILQQAGTSVLAQANQVPQNVLSLLREFCRYPAQWRPLMEKLQLKGTTYGVCSKAFKFLGTPADTGHGTVVLELQYTGTDGPCKVPISSVASLNDLTPVGRLVTVNPFVSVATANAKVLIELEPPFGDSYIVVGRGEQQINHHWHKSGSSIGK

SEQ ID NO: 640 - DNA, 1143 bp, Artificial Sequence
  STF2delta.EIII+
atggcacaagtaatcaacactaacagtctgtcgctgctgacccagaataacctgaacaaatcccagtccgcactgggcaccgctatcgagcgtctgtcttctggtctgcgtatcaacagcgcgaaagacgatgcggcaggtcaggcgattgctaaccgtttcaccgcgaacatcaaaggtctgactcaggcttcccgtaacgctaacgacggtatctccattgcgcagaccactgaaggcgcgctgaacgaaatcaacaacaacctgcagcgtgtgcgtgaactggcggttcagtctgctaacagcaccaactcccagtctgacctcgactccatccaggctgaaatcacccagcgcctgaacgaaatcgaccgtgtatccggccagactcagttcaacggcgtgaaagtcctggcgcaggacaacaccctgaccatccaggttggcgccaacgacggtgaaactatcgatatcgatctgaagcagatcaactctcagaccctgggtctggactcactgaacgtgaccgaaaacccgctgcagaaaattgatgccgcgctggcgcaggtggatgcgctgcgctctgatctgggtgcggtacaaaaccgtttcaactctgctatcaccaacctgggcaataccgtaaacaatctgtctgaagcgcgtagccgtatcgaagattccgactacgcgaccgaagtttccaacatgtctcgcgcgcagattctgcagcaggccggtacttccgttctggcgcaggctaaccaggtcccgcagaacgtgctgtctctgttacgtatggaaaaattgcagttgaagggaacaacctatggcgtctgttcaaaggctttcaagtttcttgggactcccgcagacacaggtcacggcactgtggtgttggaattgcagtacactggcacggatggaccttgcaaagttcctatctcgtcagtggcttcattgaacgacctaacgccagtgggcagattggtcactgtcaacccttttgtttcagtggccacggccaacgctaaggtcctgattgaattggaaccaccctttggagactcatacatagtggtgggcagaggagaacaacagatcaatcaccattggcacaagtctggaagcagcattggcaaa

SEQ ID NO: 641 - protein, 381 aa, Artificial Sequence
  STF2delta.EIII+
MAQVINTNSLSLLTQNNLNKSQSALGTAIERLSSGLRINSAKDDAAGQAIANRFTANIKGLTQASRNANDGISIAQTTEGALNEINNNLQRVRELAVQSANSTNSQSDLDSIQAEITQRLNEIDRVSGQTQFNGVKVLAQDNTLTIQVGANDGETIDIDLKQINSQTLGLDSLNVTENPLQKIDAALAQVDALRSDLGAVQNRFNSAITNLGNTVNNLSEARSRIEDSDYATEVSNMSRAQILQQAGTSVLAQANQVPQNVLSLLRMEKLQLKGTTYGVCSKAFKFLGTPADTGHGTVVLELQYTGTDGPCKVPISSVASLNDLTPVGRLVTVNPFVSVATANAKVLIELEPPFGDSYIVVGRGEQQINHHWHKSGSSIGK

SEQ ID NO: 642 - protein, 406 aa, Artificial Sequence
  West Nile virus envelope
FNCLGMSNRDFLEGVSGATWVDLVLEGDSCVTIMSKDKPTIDVKMMNMEAANLAEVRSYCYLATVSDLSTKAACPTMGEAHNDKRADPAFVCRQGVVDRGWGNGCGLFGKGSIDTCAKFACSTKAIGRTILKENIKYEVAIFVHGPTTVESHGNYSTQVGATQAGRFSITPAAPSYTLKLGEYGEVTVDCEPRSGIDTNAYYVMTVGTKTFLVHREWFMDLNLPWSSAGSTVWRNRETLMEFEEPHATKQSVIALGSQEGALHQALAGAIPVEFSSNTVKLTSGHLKCRVKMEKLQLKGTTYGVCSKAFKFLGTPADTGHGTVVLELQYTGTDGPCKVPISSVASLNDLTPVGRLVTVNPFVSVATANAKVLIELEPPFGDSYIVVGRGEQQINHHWHKSGSSIGK

SEQ ID NO: 643 - protein, 99 aa, Artificial Sequence
  flavivirus
GMSYSMCTGKFKVVKEIAETQHGTIVIRVQYEGDGSPCKIPFEIMDLEKRHVLGRLITVNPIVTEKDSPVNIEAEPPFGDSYIIIGVEPGQLKLNWFKK

SEQ ID NO: 644 - DNA, 38 bp, Artificial Sequence; identical to SEQ ID NO: 317
  primer

SEQ ID NO: 645 - DNA, 41 bp, Artificial Sequence; identical to SEQ ID NO: 318
  primer

SEQ ID NO: 646 - DNA, 42 bp, Artificial Sequence; identical to SEQ ID NO: 319
  primer

SEQ ID NO: 647 - DNA, 84 bp, Artificial Sequence; identical to SEQ ID NO: 320
  primer

SEQ ID NO: 648 - DNA, 20 bp, Artificial Sequence
  primer
tccggcgtagaggatcgaga

SEQ ID NO: 649 - DNA, 54 bp, Artificial Sequence
  primer
caattgaccttcaagcttcgaattgcccttacgtaacagagacagcacgttctg

SEQ ID NO: 650 - DNA, 57 bp, Artificial Sequence
  primer
aagcttgaaggtcaattggaattccctaggactagtatggaaaaattgcagttgaag

SEQ ID NO: 651 - DNA, 20 bp, Artificial Sequence
  primer
gcttaatgcgccgctacagg

SEQ ID NO: 652 - DNA, 40 bp, Artificial Sequence
  primer
gcggccgctcatggaaaaattgcagttgaagggaacaacc

SEQ ID NO: 653 - DNA, 32 bp, Artificial Sequence
  primer
ccgcggtttgccaatgctgcttccagacttgt

SEQ ID NO: 654 - DNA, 49 bp, Artificial Sequence
  primer
ccggcatgccatatggcacaagtaatcaacactaacagtctgtcgctgc

SEQ ID NO: 655 - DNA, 49 bp, Artificial Sequence
  primer
gcatgctcagcttattaagggtttgccaatgctgcttcccagacttgtg

SEQ ID NO: 656 - DNA, 27 bp, Artificial Sequence
  primer
tacgtgaattcagcagatatccagcac

SEQ ID NO: 657 - DNA, 1911 bp, Artificial Sequence
  STF2.EIII+
atggcacaagtaatcaacactaacagtctgtcgctgctgacccagaataacctgaacaaatcccagtccgcactgggcaccgctatcgagcgtctgtcttctggtctgcgtatcaacagcgcgaaagacgatgcggcaggtcaggcgattgctaaccgtttcaccgcgaacatcaaaggtctgactcaggcttcccgtaacgctaacgacggtatctccattgcgcagaccactgaaggcgcgctgaacgaaatcaacaacaacctgcagcgtgtgcgtgaactggcggttcagtctgctaacagcaccaactcccagtctgacctcgactccatccaggctgaaatcacccagcgcctgaacgaaatcgaccgtgtatccggccagactcagttcaacggcgtgaaagtcctggcgcaggacaacaccctgaccatccaggttggcgccaacgacggtgaaactatcgatatcgatctgaagcagatcaactctcagaccctgggtctggactcactgaacgtgcagaaagcgtatgatgtgaaagatacagcagtaacaacgaaagcttatgccaataatggtactacactggatgtatcgggtcttgatgatgcagctattaaagcggctacgggtggtacgaatggtacggcttctgtaaccggtggtgcggttaaatttgacgcagataataacaagtactttgttactattggtggctttactggtgctgatgccgccaaaaatggcgattatgaagttaacgttgctactgacggtacagtaacccttgcggctggcgcaactaaaaccacaatgcctgctggtgcgacaactaaaacagaagtacaggagttaaaagatacaccggcagttgtttcagcagatgctaaaaatgccttaattgctggcggcgttgacgctaccgatgctaatggcgctgagttggtcaaaatgtcttataccgataaaaatggtaagacaattgaaggcggttatgcgcttaaagctggcgataagtattacgccgcagattacgatgaagcgacaggagcaattaaagctaaaactacaagttatactgctgctgacggcactaccaaaacagcggctaaccaactgggtggcgtagacggtaaaaccgaagtcgttactatcgacggtaaaacctacaatgccagcaaagccgctggtcatgatttcaaagcacaaccagagctggcggaagcagccgctaaaaccaccgaaaacccgctgcagaaaattgatgccgcgctggcgcaggtggatgcgctgcgctctgatctgggtgcggtacaaaaccgtttcaactctgctatcaccaacctgggcaataccgtaaacaatctgtctgaagcgcgtagccgtatcgaagattccgactacgcgaccgaagtttccaacatgtctcgcgcgcagattctgcagcaggccggtacttccgttctggcgcaggctaaccaggtcccgcagaacgtgctgtctctgttacgtaagggcaattcgaagcttgaaggtcaattggaattccctaggactagtatggaaaaattgcagttgaagggaacaacctatggcgtctgttcaaaggctttcaagtttcttgggactcccgcagacacaggtcacggcactgtggtgttggaattgcagtacactggcacggatggaccttgcaaagttcctatctcgtcagtggcttcattgaacgacctaacgccagtgggcagattggtcactgtcaacccttttgtttcagtggccacggccaacgctaaggtcctgattgaattggaaccaccctttggagactcatacatagtggtgggcagaggagaacaacagatcaatcaccattggcacaagtctggaagcagcattggcaaa

SEQ ID NO: 658 - protein, 637 aa, Artificial Sequence
  STF2.EIII+
MAQVINTNSLSLLTQNNLNKSQSALGTAIERLSSGLRINSAKDDAAGQAIANRFTANIKGLTQASRNANDGISIAQTTEGALNEINNNLQRVRELAVQSANSTNSQSDLDSIQAEITQRLNEIDRVSGQTQFNGVKVLAQDNTLTIQVGANDGETIDIDLKQINSQTLGLDSLNVQKAYDVKDTAVTTKAYANNGTTLDVSGLDDAAIKAATGGTNGTASVTGGAVKFDADNNKYFVTIGGFTGADAAKNGDYEVNVATDGTVTLAAGATKTTMPAGATTKTEVQELKDTPAVVSADAKNALIAGGVDATDANGAELVKMSYTDKNGKTIEGGYALKAGDKYYAADYDEATGAIKAKTTSYTAADGTTKTAANQLGGVDGKTEVVTIDGKTYNASKAAGHDFKAQPELAEAAAKTTENPLQKIDAALAQVDALRSDLGAVQNRFNSAITNLGNTVNNLSEARSRIEDSDYATEVSNMSRAQILQQAGTSVLAQANQVPQNVLSLLRKGNSKLEGQLEFPRTSMEKLQLKGTTYGVCSKAFKFLGTPADTGHGTVVLELQYTGTDGPCKVPISSVASLNDLTPVGRLVTVNPFVSVATANAKVLIELEPPFGDSYIVVGRGEQQINHHWHKSGSSIGK

SEQ ID NO: 659 - protein, 10 aa, Artificial Sequence
  Linker
GAPVDPASPW

SEQ ID NO: 660 - DNA, 1218 bp, Artificial Sequence
  West Nile virus envelope protein
ttcaactgccttggaatgagcaacagagacttcttggaaggagtgtctggagcaacatgggtggatttggttctcgaaggcgacagctgcgtgactatcatgtctaaggacaagcctaccatcgatgtgaagatgatgaatatggaggcggccaacctggcagaggtccgcagttattgctatttggctaccgtcagcgatctctccaccaaagctgcgtgcccgaccatgggagaagctcacaatgacaaacgtgctgacccagcttttgtgtgcagacaaggagtggtggacaggggctggggcaacggctgcggactatttggcaaaggaagcattgacacatgcgccaaatttgcctgctctaccaaggcaataggaagaaccatcttgaaagagaatatcaagtacgaagtggccatttttgtccatggaccaactactgtggagtcgcacggaaactactccacacaggttggagccactcaggcagggagattcagcatcactcctgcagcgccttcatacacactaaagcttggagaatatggagaggtgacagtggactgtgaaccacggtcagggattgacaccaatgcatactacgtgatgactgttggaacaaagacgttcttggtccatcgtgagtggttcatggacctcaacctcccttggagcagtgctggaagtactgtgtggaggaacagagagacgttaatggagtttgaggaaccacacgccacgaagcagtctgtgatagcattgggctcacaagagggagctctgcatcaagctttggctggagccattcctgtggaattttcaagcaacactgtcaagttgacgtcgggtcatttgaagtgtagagtgaagatggaaaaattgcagttgaagggaacaacctatggcgtctgttcaaaggctttcaagtttcttgggactcccgcagacacaggtcacggcactgtggtgttggaattgcagtacactggcacggatggaccttgcaaagttcctatctcgtcagtggcttcattgaacgacctaacgccagtgggcagattggtcactgtcaacccttttgtttcagtggccacggccaacgctaaggtcctgattgaattggaaccaccctttggagactcatacatagtggtgggcagaggagaacaacagatcaatcaccattggcacaagtctggaagcagcattggcaaa

SEQ ID NO: 661 - protein, 506 aa, S. muenchen; identical to SEQ ID NO: 504

SEQ ID NO: 662 - DNA, 1521 bp, S. muenchen
atggcacaagtcattaatacaaacagcctgtcgctgttgacccagaataacctgaacaaatcccagtccgctctgggcaccgctatcgagcgtctgtcttccggtctgcgtatcaacagcgcgaaagacgatgcggcaggtcaggcgattgctaaccgtttcaccgcgaacatcaaaggtctgactcaggcttcccgtaacgctaacgacggtatctccattgcgcagaccactgaaggcgcgctgaacgaaatcaacaacaacctgcagcgtgtgcgtgaactggcggttcagtctgctaacggtactaactcccagtctgaccttgactctatccaggctgaaatcacccagcgtctgaacgaaatcgaccgtgtatccggtcagactcagttcaacggcgtgaaagtcctggcgcaggacaacaccctgaccatccaggttggtgccaacgacggtgaaactattgatattgatttaaaagaaattagctctaaaacactgggacttgataagcttaatgtccaggatgcctacaccccgaaagaaactgctgtaaccgttgataaaactacctataaaaatggtacagatactattacagcccagagcaatactgatatccaaactgcaattggcggtggtgcaacgggggttactggggctgatatcaaatttaaagatggtcaatactatttagatgttaaaggcggtgcttctgctggtgtttataaagccacttatgatgaaactacaaagaaagttaatattgatacgactgataaaactccgttagcaactgcggaagctacagctattcggggaacggccactataacccacaaccaaattgctgaagtaacaaaagagggtgttgatacgaccacagttgcggctcaacttgctgctgcaggggttactggtgccgataaggacaatactagccttgtaaaactatcgtttgaggataaaaacggtaaggttattgatggtggctatgcagtgaaaatgggcgacgatttctatgccgctacatatgatgagaaaacaggtacaattactgctaaaacaaccacttatacagatggtgctggcgttgctcaaactggagctgtgaaatttggtggcgcaaatggtaaatctgaagttgttactgctaccgatggtaaaacttacttagcaagcgaccttgacaaacataacttcagaacaggcggtgagcttaaagaggttaatacagataagactgaaaacccactgcagaaaattgatgctgccttggcacaggttgatacacttcgttctgacctgggtgcggtacagaaccgtttcaactccgctatcaccaacctgggcaataccgtaaataacctgtcttctgcccgtagccgtatcgaagattccgactacgcgaccgaagtctccaacatgtctcgcgcgcagattctgcagcaggccggtacctccgttctggcgcaggctaaccaggttccgcaaaacgtcctctctttactgcgttaa

SEQ ID NO: 663 - protein, 12 aa, Artificial Sequence
  Linker
EFSRYPAQWRPL

SEQ ID NO: 664 - DNA, 36 bp, Artificial Sequence; identical to SEQ ID NO: 525
  Linker

SEQ ID NO: 665 - protein, 45 aa, Artificial Sequence; identical to SEQ ID NO: 526
  Linker

SEQ ID NO: 666 - DNA, 135 bp, Artificial Sequence; identical to SEQ ID NO: 527
  Linker

SEQ ID NO: 667 - protein, 192 aa, Artificial Sequence
  Hepatitis C E1
YQVRNSTGLYHVTNDCPNSSIVYEAADAILHTPGCVPCVREGNASRCWVAMTPTVATRDGKLPATQLRRHIDLLVGSATLCSALYVGDLCGSVFLVGQLFTFSPRRHWTTQGCNCSIYPGHITGHRMAWDMMMNWSPTTALVMAQLLRIPQAILDMIAGAHWGVLAGIAYFSMVGNWAKVLVVLLLFAGVDA

SEQ ID NO: 668 - protein, 363 aa, Artificial Sequence
  Hepatitis C E2
ETHVTGGSAGHTVSGFVSLLAPGAKQNVQLINTNGSWHLNSTALNCNDSLNTGWLAGLFYHHKFNSSGCPERLASCRPLTDFDQGWGPISYANGSGPDQRPYCWHYPPKPCGIVPAKSVCGPVYCFTPSPVVVGTTDRSGAPTYSWGENDTDVFVLNNTRPPLGNWFGCTWMNSTGFTKVCGAPPCVIGGAGNNTLHCPTDCFRKHPDATYSRCGSGPWITPRCLVDYPYRLWHYPCTINYTIFKIRMYVGGVEHRLEAACNWTRGERCDLEDRDRSELSPLLLTTTQWQVLPCSFTTLPALSTGLIHLHQNIVDVQYLYGVGSSIASWAIKWEYVVLLFLLLADARVCSCLWMMLLISQAEA

SEQ ID NO: 669 - DNA, 576 bp, Artificial Sequence
  Hepatitis C E1
taccaagtgcgcaactccacggggctctaccacgtcaccaatgattgccctaactcgagtattgtgtacgaggcggccgatgccatcctgcacactccggggtgcgtcccttgcgttcgcgagggcaacgcctcgaggtgttgggtggcgatgacccctacggtggccaccagggatggcaaactccccgcgacgcagcttcgacgtcacatcgatctgcttgtcgggagcgccaccctctgttcggccctctacgtgggggacctgtgcgggtctgtctttcttgtcggccaactgtttaccttctctcccaggcgccactggacgacgcaaggttgcaattgctctatctatcccggccatataacgggtcaccgcatggcatgggatatgatgatgaactggtcccctacgacggcgttggtaatggctcagctgctccggatcccacaagccatcttggacatgatcgctggtgctcactggggagtcctggcgggcatagcgtatttctccatggtggggaactgggcgaaggtcctggtagtgctgctgctatttgccggcgtcgacgcg

SEQ ID NO: 670 - DNA, 1089 bp, Artificial Sequence
  Hepatitis C E2
gaaacccacgtcaccgggggaagtgccggccacactgtgtctggatttgttagcctcctcgcaccaggcgccaagcagaacgtccagctgatcaacaccaacggcagttggcacctcaatagcacggccctgaactgcaatgatagcctcaacaccggctggttggcagggcttttctatcaccacaagttcaactcttcaggctgtcctgagaggctagccagctgccgaccccttaccgattttgaccagggctggggccctatcagttatgccaacggaagcggccccgaccagcgcccctactgctggcactaccccccaaaaccttgcggtattgtgcccgcgaagagtgtgtgtggtccggtatattgcttcactcccagccccgtggtggtgggaacgaccgacaggtcgggcgcgcccacctacagctggggtgaaaatgatacggacgtcttcgtccttaacaataccaggccaccgctgggcaattggttcggttgtacctggatgaactcaactggattcaccaaagtgtgcggagcgcctccttgtgtcatcggaggggcgggcaacaacaccctgcactgccccactgattgcttccgcaagcatccggacgccacatactctcggtgcggctccggtccctggatcacacccaggtgcctggtcgactacccgtataggctttggcattatccttgtaccatcaactacactatatttaaaatcaggatgtacgtgggaggggtcgagcacaggctggaagctgcctgcaactggacgcggggcgaacgttgcgatctggaagatagggacaggtccgagctcagcccgttactgctgaccactacacagtggcaggtcctcccgtgttccttcacaaccctgccagccttgtccaccggcctcatccacctccaccagaacattgtggacgtgcagtacttgtacggggtggggtcaagcatcgcgtcctgggccattaagtgggagtacgtcgtcctcctgttccttctgcttgcagacgcgcgcgtctgctcctgcttgtggatgatgctactcatatcccaagcggaagcg

SEQ ID NO: 671 - protein, 595 aa, E. coli
MAQVINTNSLSLITQNNINKNQSALSSSIERLSSGLRINSAKDDAAGQAIANRFTSNIKGLTQAARNANDGISVAQTTEGALSEINNNLQRIRELTVQASTGTNSDSDLDSIQDEIKSRLDEIDRVSGQTQFNGVNVLAKDGSMKIQVGANDGQTITIDLKKIDSDTLGLNGFNVNGSGTIANKAATISDLTAAKMDAATNTITTTNNALTASKALDQLKDGDTVTIKADAAQTATVYTYNASAGNFSFSNVSNNTSAKAGDVAASLLPPAGQTASGVYKAASGEVNFDVDANGKITIGGQKAYLTSDGNLTTNDAGGATAATLDGLFKKAGDGQSIGFKKTASVTMGGTTYNFKTGADADAATANAGVSFTDTASKETVLNKVATAKQGKAVAADGDTSATITYKSGVQTYQAVFAAGDGTASAKYADKADVSNATATYTDADGEMTTIGSYTTKYSIDANNGKVTVDSGTGTGKYAPKVGAEVYVSANGTLTTDATSEGTVTKDPLKALDEAISSIDKFRSSLGAIQNRLDSAVTNLNNTTTNLSEAQSRIQDADYATEVSNMSKAQIIQQAGNSVLAKANQVPQQVLSLLQG

SEQ ID NO: 672 - DNA, 1788 bp, E. coli
atggcacaagtcattaataccaacagcctctcgctgatcactcaaaataatatcaacaagaaccagtctgcgctgtcgagttctatcgagcgtctgtcttctggcttgcgtattaacagcgcgaaggatgacgcagcgggtcaggcgattgctaaccgtttcacctctaacattaaaggcctgactcaggcggcccgtaacgccaacgacggtatctccgttgcgcagaccaccgaaggcgcgctgtccgaaatcaacaacaacttacagcgtatccgtgaactgacggttcaggcttctaccgggactaactccgattcggatctggactccattcaggacgaaatcaaatcccgtctggacgaaattgaccgcgtatctggccagacccagttcaacggcgtgaacgtactggcgaaagacggttcaatgaaaattcaggttggtgcgaatgacggccagactatcacgattgatctgaagaaaattgactcagatacgctggggctgaatggttttaacgtgaatggttccggtacgatagccaataaagcggcgaccattagcgacctgacagcagcgaaaatggatgctgcaactaatactataactacaacaaataatgcgctgactgcatcaaaggcgcttgatcaactgaaagatggtgacactgttactatcaaagcagatgctgctcaaactgccacggtttatacatacaatgcatcagctggtaacttctcattcagtaatgtatcgaataatacttcagcaaaagcaggtgatgtagcagctagccttctcccgccggctgggcaaactgctagtggtgtttataaagcagcaagcggtgaagtgaactttgatgttgatgcgaatggtaaaatcacaatcggaggacagaaagcatatttaactagtgatggtaacttaactacaaacgatgctggtggtgcgactgcggctacgcttgatggtttattcaagaaagctggtgatggtcaatcaatcgggtttaagaagactgcatcagtcacgatggggggaacaacttataactttaaaacgggtgctgatgctgatgctgcaactgctaacgcaggggtatcgttcactgatacagctagcaaagaaaccgttttaaataaagtggctacagctaaacaaggcaaagcagttgcagctgacggtgatacatccgcaacaattacctataaatctggcgttcagacgtatcaggctgtatttgccgcaggtgacggtactgctagcgcaaaatatgccgataaagctgacgtttctaatgcaacagcaacatacactgatgctgatggtgaaatgactacaattggttcatacaccacgaagtattcaatcgatgctaacaacggcaaggtaactgttgattctggaactggtacgggtaaatatgcgccgaaagtaggggctgaagtatatgttagtgctaatggtactttaacaacagatgcaactagcgaaggcacagtaacaaaagatccactgaaagctctggatgaagctatcagctccatcgacaaattccgttcttccctgggtgctatccagaaccgtctggattccgcagtcaccaacctgaacaacaccactaccaacctgtccgaagcgcagtcccgtattcaggacgccgactatgcgaccgaagtgtccaacatgtcgaaagcgcagatcattcagcaggccggtaactccgtgctggcaaaagccaaccaggtaccgcagcaggttctgtctctgctgcagggttaa

SEQ ID NO: 673 - DNA, 1224 bp, Artificial Sequence; identical to SEQ ID NO: 636
  STF2delta.EIII+

SEQ ID NO: 674 - protein, 408 aa, Artificial Sequence; identical to SEQ ID NO: 637
  STF2delta.EIII+

SEQ ID NO: 675 - protein, 408 aa, Artificial Sequence
  STF2delta.EIII+
MAQVINTNSLSLLTQNNLNKSQSALGTAIERLSSGLRINSAKDDAAGQAIANRFTANIKGLTQASRNANDGISIAQTTEGALNEINNNLQRVRELAVQSANSTNSQSDLDSIQAEITQRLNEIDRVSGQTQFNGVKVLAQDNTLTIQVGANDGETIDIDLKQINSQTLGLDSLNVHGAPVDPASPWTENPLQKIDAALAQVDALRSDLGAVQNRFNSAITNLGNTVNNLSEARSRIEDSDYATEVSNMSRAQILQQAGTSVLAQANQVPQNVLSLLREFSRYPAQWRPLMEKLQLKGTTYGVCSKAFKFLGTPADTGHGTVVLELQYTGTDGPCKVPISSVASLNDLTPVGRLVTVNPFVSVATANAKVLIELEPPFGDSYIVVGRGEQQINHHWHKSGSSIGKPLIS

SEQ ID NO: 676 - DNA, 1227 bp, Artificial Sequence
  STF2delta.EIII+
atggcacaagtaatcaacactaacagtctgtcgctgctgacccagaataacctgaacaaatcccagtccgcactgggcaccgctatcgagcgtctgtcttctggtctgcgtatcaacagcgcgaaagacgatgcggcaggtcaggcgattgctaaccgtttcaccgcgaacatcaaaggtctgactcaggcttcccgtaacgctaacgacggtatctccattgcgcagaccactgaaggcgcgctgaacgaaatcaacaacaacctgcagcgtgtgcgtgaactggcggttcagtctgctaacagcaccaactcccagtctgacctcgactccatccaggctgaaatcacccagcgcctgaacgaaatcgaccgtgtatccggccagactcagttcaacggcgtgaaagtcctggcgcaggacaacaccctgaccatccaggttggcgccaacgacggtgaaactatcgatatcgatctgaagcagatcaactctcagaccctgggtctggactcactgaacgtgcatggagcgccggtggatcctgctagcccatggaccgaaaacccgctgcagaaaattgatgccgcgctggcgcaggtggatgcgctgcgctctgatctgggtgcggtacaaaaccgtttcaactctgctatcaccaacctgggcaataccgtaaacaatctgtctgaagcgcgtagccgtatcgaagattccgactacgcgaccgaagtttccaacatgtctcgcgcgcagattttgcagcaggccggtacttccgttctggcgcaggctaaccaggtcccgcagaacgtgctgtctctgttacgtgaattctctagatatccagcacagtggcggccgctcatggaaaaattgcagttgaagggaacaacctatggcgtctgttcaaaggctttcaagtttcttgggactcccgcagacacaggtcacggcactgtggtgttggaattgcagtacactggcacggatggaccttgcaaagttcctatctcgtcagtggcttcattgaacgacctaacgccagtgggcagattggtcactgtcaacccttttgtttcagtggccacggccaacgctaaggtcctgattgaattggaaccaccctttggagactcatacatagtggtgggcagaggagaacaacagatcaatcaccattggcacaagtctggaagcagcattggcaaacccttaataagctga

SEQ ID NO: 677 - DNA, 35 bp, Artificial Sequence
  Linker
gaattctctagatatccagcacagtggcggccgct

SEQ ID NO: 678 - protein, 12 aa, Artificial Sequence
  Linker
EFSRYPAQWRPL

SEQ ID NO: 679 - protein, 405 aa, Artificial Sequence
  pET/STF2delta.JEIII+
MAQVINTNSLSLLTQNNLNKSQSALGTAIERLSSGLRINSAKDDAAGQAIANRFTANIKGLTQASRNANDGISIAQTTEGALNEINNNLQRVRELAVQSANSTNSQSDLDSIQAEITQRLNEIDRVSGQTQFNGVKVLAQDNTLTIQVGANDGETIDIDLKQINSQTLGLDSLNVHGAPVDPASPWTENPLQKIDAALAQVDALRSDLGAVQNRFNSAITNLGNTVNNLSEARSRIEDSDYATEVSNMSRAQILQQAGTSVLAQANQVPQNVLSLLREFSRYPAQWRPLMDKLALKGTTYGMCTEKFSFAKNPVDTGHGTVVIELSYSGSDGPCKIPIVSVASLNDMTPVGRLVTVNPFVATSSANSKVLVEMEPPFGDSYIVVGRGDKQINHHWHKAGSTLGKA

SEQ ID NO: 680 - DNA, 1215 bp, Artificial Sequence
  pET/STF2delta.JEIII+
atggcacaagtaatcaacactaacagtctgtcgctgctgacccagaataacctgaacaaatcccagtccgcactgggcaccgctatcgagcgtctgtcttctggtctgcgtatcaacagcgcgaaagacgatgcggcaggtcaggcgattgctaaccgtttcaccgcgaacatcaaaggtctgactcaggcttcccgtaacgctaacgacggtatctccattgcgcagaccactgaaggcgcgctgaacgaaatcaacaacaacctgcagcgtgtgcgtgaactggcggttcagtctgctaacagcaccaactcccagtctgacctcgactccatccaggctgaaatcacccagcgcctgaacgaaatcgaccgtgtatccggccagactcagttcaacggcgtgaaagtcctggcgcaggacaacaccctgaccatccaggttggcgccaacgacggtgaaactatcgatatcgatctgaagcagatcaactctcagaccctgggtctggactcactgaacgtgcatggagcgccggtggatcctgctagcccatggaccgaaaacccgctgcagaaaattgatgccgcgctggcgcaggtggatgcgctgcgctctgatctgggtgcggtacaaaaccgtttcaactctgctatcaccaacctgggcaataccgtaaacaatctgtctgaagcgcgtagccgtatcgaagattccgactacgcgaccgaagtttccaacatgtctcgcgcgcagattttgcagcaggccggtacttccgttctggcgcaggctaaccaggtcccgcagaacgtgctgtctctgttacgtgaattcagcagatatccagcacagtggcggccgctcatggacaaactggctctgaaaggcacaacctatggcatgtgtacagaaaaattctcgttcgcgaaaaatccggtggacactggtcacggaacagttgtcattgaactctcctactctgggagtgatggcccctgcaaaattccgattgtttccgttgcgagcctcaatgacatgacccccgttgggcggctggtgacagtgaaccccttcgtcgcgacttccagtgccaactcaaaggtgctggtcgagatggaaccccccttcggagactcctacatcgtagttggaaggggagacaagcagatcaaccaccattggcacaaagctggaagcacgctgggcaaggcc

SEQ ID NO: 681 - DNA, 348 bp, Artificial Sequence
  JEIII+
atggacaaactggctctgaaaggcacaacctatggcatgtgtacagaaaaattctcgttcgcgaaaaatccggtggacactggtcacggaacagttgtcattgaactctcctactctgggagtgatggcccctgcaaaattccgattgtttccgttgcgagcctcaatgacatgacccccgttgggcggctggtgacagtgaaccccttcgtcgcgacttccagtgccaactcaaaggtgctggtcgagatggaaccccccttcggagactcctacatcgtagttggaaggggagacaagcagatcaaccaccattggcacaaagctggaagcacgctgggcaaggcc

SEQ ID NO: 682 - protein, 116 aa, Artificial Sequence
  JEIII+
MDKLALKGTTYGMCTEKFSFAKNPVDTGHGTVVIELSYSGSDGPCKIPIVSVASLNDMTPVGRLVTVNPFVATSSANSKVLVEMEPPFGDSYIVVGRGDKQINHHWHKAGSTLGKA

SEQ ID NO: 683 - protein, 389 aa, Artificial Sequence
  pET/STF2delta.Den1 EIII
MAQVINTNSLSLLTQNNLNKSQSALGTAIERLSSGLRINSAKDDAAGQAIANRFTANIKGLTQASRNANDGISIAQTTEGALNEINNNLQRVRELAVQSANSTNSQSDLDSIQAEITQRLNEIDRVSGQTQFNGVKVLAQDNTLTIQVGANDGETIDIDLKQINSQTLGLDSLNVHGAPVDPASPWTENPLQKIDAALAQVDALRSDLGAVQNRFNSAITNLGNTVNNLSEARSRIEDSDYATEVSNMSRAQILQQAGTSVLAQANQVPQNVLSLLREFSRYPAQWRPLKGMSYVMCTGSFKLEKEVAETQHGTVLVQVKYEGTDAPCKIPFSTQDEKGVTQNGRLITANPIVTDKEKPVNIEAEPPFGENYIVVGAGEKALKLSWFKK

SEQ ID NO: 684 - DNA, 1185 bp, Artificial Sequence
  pET/STF2delta.Den1 EIII
atggcacaagtaatcaacactaacagtctgtcgctgctgacccagaataacctgaacaaatcccagtccgcactgggcaccgctatcgagcgtctgtcttctggtctgcgtatcaacagcgcgaaagacgatgcggcaggtcaggcgattgctaaccgtttcaccgcgaacatcaaaggtctgactcaggcttcccgtaacgctaacgacggtatctccattgcgcagaccactgaaggcgcgctgaacgaaatcaacaacaacctgcagcgtgtgcgtgaactggcggttcagtctgctaacagcaccaactcccagtctgacctcgactccatccaggctgaaatcacccagcgcctgaacgaaatcgaccgtgtatccggccagactcagttcaacggcgtgaaagtcctggcgcaggacaacaccctgaccatccaggttggcgccaacgacggtgaaactatcgatatcgatctgaagcagatcaactctcagaccctgggtctggactcactgaacgtgcatggagcgccggtggatcctgctagcccatggaccgaaaacccgctgcagaaaattgatgccgcgctggcgcaggtggatgcgctgcgctctgatctgggtgcggtacaaaaccgtttcaactctgctatcaccaacctgggcaataccgtaaacaatctgtctgaagcgcgtagccgtatcgaagattccgactacgcgaccgaagtttccaacatgtctcgcgcgcagattttgcagcaggccggtacttccgttctggcgcaggctaaccaggtcccgcagaacgtgctgtctctgttacgtgaattcagcagatatccagcacagtggcggccgctcaaaggaatgtcttacgtaatgtgcacaggcagtttcaagctggaaaaagaagttgccgaaacacagcatggcacggtactagtccaagtgaaatatgagggaacagacgcgccatgtaagataccattttccactcaagatgagaaaggggcgactcagaacggaagattgataaccgcaaatcctatcgtaaccgacaaggaaaagcccgtgaatattgaggcagagcctccgtttggggagtcgtatatcgtcgttggtgctggtgaaaaggctttaaagctcagttggttcaaaaaggggtcaagcattggtaaa

SEQ ID NO: 685 - protein, 389 aa, Artificial Sequence
  pET/STF2delta.Den2 EIII
MAQVINTNSLSLLTQNNLNKSQSALGTAIERLSSGLRINSAKDDAAGQAIANRFTANIKGLTQASRNANDGISIAQTTEGALNEINNNLQRVRELAVQSANSTNSQSDLDSIQAEITQRLNEIDRVSGQTQFNGVKVLAQDNTLTIQVGANDGETIDIDLKQINSQTLGLDSLNVHGAPVDPASPWTENPLQKIDAALAQVDALRSDLGAVQNRFNSAITNLGNTVNNLSEARSRIEDSDYATEVSNMSRAQILQQAGTSVLAQANQVPQNVLSLLREFSRYPAQWRPLKGMSYSMCTGKFKVVKEIAETQHGTIVIRVQYEGDGSPCKTPFEIMDLEKRHVLGRLTTVNPIVTEKDSPVNIEAEPPFGDSYIIIGVEPGQLKLDWFKK

SEQ ID NO: 686 - DNA, 1185 bp, Artificial Sequence
  pET/STF2delta.Den2 EIII
atggcacaagtaatcaacactaacagtctgtcgctgctgacccagaataacctgaacaaatcccagtccgcactgggcaccgctatcgagcgtctgtcttctggtctgcgtatcaacagcgcgaaagacgatgcggcaggtcaggcgattgctaaccgtttcaccgcgaacatcaaaggtctgactcaggcttcccgtaacgctaacgacggtatctccattgcgcagaccactgaaggcgcgctgaacgaaatcaacaacaacctgcagcgtgtgcgtgaactggcggttcagtctgctaacagcaccaactcccagtctgacctcgactccatccaggctgaaatcacccagcgcctgaacgaaatcgaccgtgtatccggccagactcagttcaacggcgtgaaagtcctggcgcaggacaacaccctgaccatccaggttggcgccaacgacggtgaaactatcgatatcgatctgaagcagatcaactctcagaccctgggtctggactcactgaacgtgcatggagcgccggtggatcctgctagcccatggaccgaaaacccgctgcagaaaattgatgccgcgctggcgcaggtggatgcgctgcgctctgatctgggtgcggtacaaaaccgtttcaactctgctatcaccaacctgggcaataccgtaaacaatctgtctgaagcgcgtagccgtatcgaagattccgactacgcgaccgaagtttccaacatgtctcgcgcgcagattttgcagcaggccggtacttccgttctggcgcaggctaaccaggtcccgcagaacgtgctgtctctgttacgtgaattcagcagatatccagcacagtggcggccgctcaaaggtatgagctatagcatgtgtaccggtaaatttaaagttgttaaagaaattgcggaaacccagcatggtaccattgttattcgtgttcagtatgaaggtgatggtagcccgtgtaaaattccgtttgaaattatggatctggaaaaacgtcatgttctgggtcgtctgattaccgttaatccgattgttaccgaaaaagatagcccggttaatattgaagcggaaccgccgtttggtgatagctatattattattggtgttgaaccgggtcagctgaaactgaattggtttaaaaaaggtagcagcattggtcag

SEQ ID NO: 687 - protein, 389 aa, Artificial Sequence
  pET/STF2delta.Den3 EIII
MAQVINTNSLSLLTQNNLNKSQSALGTAIERLSSGLRINSAKDDAAGQAIANRFTANIKGLTQASRNANDGISIAQTTEGALNEINNNLQRVRELAVQSANSTNSQSDLDSIQAEITQRLNEIDRVSGQTQFNGVKVLAQDNTLTIQVGANDGETIDIDLKQINSQTLGLDSLNVHGAPVDPASPWTENPLQKIDAALAQVDALRSDLGAVQNRFNSAITNLGNTVNNLSEARSRIEDSDYATEVSNMSRAQILQQAGTSVLAQANQVPQNVLSLLREFSRYPAQWRPLKGMSYAMCLNTFVLKKEVSETQHGTILIKVEYKGEDAPCKIPFSTEDGQGKAHNGRLITANPVVTKKEEPVNIEAEPPFGESNIVIGIGDKALKINWYRK

SEQ ID NO: 688 - DNA, 1185 bp, Artificial Sequence
  pET/STF2delta.Den3 EIII
atggcacaagtaatcaacactaacagtctgtcgctgctgacccagaataacctgaacaaatcccagtccgcactgggcaccgctatcgagcgtctgtcttctggtctgcgtatcaacagcgcgaaagacgatgcggcaggtcaggcgattgctaaccgtttcaccgcgaacatcaaaggtctgactcaggcttcccgtaacgctaacgacggtatctccattgcgcagaccactgaaggcgcgctgaacgaaatcaacaacaacctgcagcgtgtgcgtgaactggcggttcagtctgctaacagcaccaactcccagtctgacctcgactccatccaggctgaaatcacccagcgcctgaacgaaatcgaccgtgtatccggccagactcagttcaacggcgtgaaagtcctggcgcaggacaacaccctgaccatccaggttggcgccaacgacggtgaaactatcgatatcgatctgaagcagatcaactctcagaccctgggtctggactcactgaacgtgcatggagcgccggtggatcctgctagcccatggaccgaaaacccgctgcagaaaattgatgccgcgctggcgcaggtggatgcgctgcgctctgatctgggtgcggtacaaaaccgtttcaactctgctatcaccaacctgggcaataccgtaaacaatctgtctgaagcgcgtagccgtatcgaagattccgactacgcgaccgaagtttccaacatgtctcgcgcgcagattttgcagcaggccggtacttccgttctggcgcaggctaaccaggtcccgcagaacgtgctgtctctgttacgtgaattcagcagatatccagcacagtggcggccgctcaaaggaatgagttatgcaatgtgtttaaatacatttgtattaaaaaaagaagtaagtgaaacacaacatggaacaatattaataaaagtagaatataaaggagaagatgcaccatgtaaaataccatttagtacagaagatggacaaggaaaagcacataatggaagattaataacagcaaatccagtagtaacaaaaaaagaagaaccagtaaatatagaagcagaaccaccatttggagaaagtaatatagtaataggaataggagataaagcattaaaaataaattggtatagaaaaggaagtagtataggaaaa

SEQ ID NO: 689 - protein, 388 aa, Artificial Sequence
  pET/STF2delta.Den4 EIII
MAQVINTNSLSLLTQNNLNKSQSALGTAIERLSSGLRINSAKDDAAGQAIANRFTANIKGLTQASRNANDGISIAQTTEGALNEINNNLQRVRELAVQSANSTNSQSDLDSIQAEITQRLNEIDRVSGQTQFNGVKVLAQDNTLTIQVGANDGETIDIDLKQINSQTLGLDSLNVHGAPVDPASPWTENPLQKIDAALAQVDALRSDLGAVQNRFNSAITNLGNTVNNLSEARSRIEDSDYATEVSNMSRAQILQQAGTSVLAQANQVPQNVLSLLREFSRYPAQWRPLKGMSYTMCSGKFSIDKEMAETQHGTTVVKVKYEGAGAPCKVPIEIRDVNKEKVVGRIISPTPFAENTNSVTNIELERPLDSYIVIGVGDSALTLHWFRK

SEQ ID NO: 690 - DNA, 1185 bp, Artificial Sequence
  pET/STF2delta.Den4 EIII
atggcacaagtaatcaacactaacagtctgtcgctgctgacccagaataacctgaacaaatcccagtccgcactgggcaccgctatcgagcgtctgtcttctggtctgcgtatcaacagcgcgaaagacgatgcggcaggtcaggcgattgctaaccgtttcaccgcgaacatcaaaggtctgactcaggcttcccgtaacgctaacgacggtatctccattgcgcagaccactgaaggcgcgctgaacgaaatcaacaacaacctgcagcgtgtgcgtgaactggcggttcagtctgctaacagcaccaactcccagtctgacctcgactccatccaggctgaaatcacccagcgcctgaacgaaatcgaccgtgtatccggccagactcagttcaacggcgtgaaagtcctggcgcaggacaacaccctgaccatccaggttggcgccaacgacggtgaaactatcgatatcgatctgaagcagatcaactctcagaccctgggtctggactcactgaacgtgcatggagcgccggtggatcctgctagcccatggaccgaaaacccgctgcagaaaattgatgccgcgctggcgcaggtggatgcgctgcgctctgatctgggtgcggtacaaaaccgtttcaactctgctatcaccaacctgggcaataccgtaaacaatctgtctgaagcgcgtagccgtatcgaagattccgactacgcgaccgaagtttccaacatgtctcgcgcgcagattttgcagcaggccggtacttccgttctggcgcaggctaaccaggtcccgcagaacgtgctgtctctgttacgtgaattcagcagatatccagcacagtggcggccgctcaagggaatgtcatacacgatgtgtagtggtaaattctctatagacaaagagatggcagagacacaacacgggacaaccgtcgtgaaggttaagtatgaaggagctggcgcaccgtgcaaagtacccatcgaaattagggatgtaaacaaagagaaggtcgttgggcgtatcattagctcaaccccacttgcggaaaatactaattctgtaacgaacatagagttggaaccaccttttggtgatagctatatagttattggtgtgggcaatagtgccttaactctacattggtttagaaaaggatcctcgatcgggaaa

SEQ ID NO: 691 - protein, 27 aa, Artificial Sequence
  West Nile virus
LTSGHLKCRVKMEKLQLKGTTYGVCSK

SEQ ID NO: 692 - protein, 27 aa, Artificial Sequence
  Japanese encephalitis virus
LTSGHLKCRLKMDKLALKGTTYGMCTE

SEQ ID NO: 693 - protein, 27 aa, Artificial Sequence
  Dengue virus
IFAGHLKCRLKMDKLTLKGMSYVMCTG

SEQ ID NO: 694 - protein, 27 aa, Artificial Sequence
  Dengue virus
LFTGHLKCRLRMDKLQLKGMSYSMCTG

SEQ ID NO: 695 - protein, 27 aa, Artificial Sequence
  Dengue virus
IFAGHLKCRLKMDKLKLKGMSYAMCLN

SEQ ID NO: 696 - protein, 27 aa, Artificial Sequence
  Dengue virus
MFAGHLKCKVRMEKLRIKGMSYTMCSG

SEQ ID NO: 697 - protein, 27 aa, Artificial Sequence
  Flavivirus envelope protein
  VARIANT 1, 2, 3, 10, 11, 13, 16, 20, 21, 23, 24, 26, 27: Xaa = Any Amino Acid
XXXGHLKCRXXMXKLXLKGXXYXXCXX

SEQ ID NO: 698 - protein, 14 aa, Artificial Sequence
  Flavivirus envelope protein
GHLKCRMKLLKGYC

SEQ ID NO: 699 - protein, 100 aa, Artificial Sequence
  Dengue virus
KGMSYVMCTGSFKLEKEVAETQHGTVLVQVKYEGTDAPCKIPFSTQDEKGVTQNGRLITANPIVTDKEKPVNIEAEPPFGENYIVVGAGEKALKLSWFKK

SEQ ID NO: 700 - protein, 100 aa, Artificial Sequence
  Dengue virus
KGMSYSMCTGKFKVVKEIAETQHGTIVIRVQYEGDGSPCKTPFEIMDLEKRHVLGRLTTVNPIVTEKDSPVNIEAEPPFGDSYIIIGVEPGQLKLDWFKK

SEQ ID NO: 701 - protein, 100 aa, Artificial Sequence
  Dengue virus
KGMSYAMCLNTFVLKKEVSETQHGTILIKVEYKGEDAPCKIPFSTEDGQGKAHNGRLITANPVVTKKEEPVNIEAEPPFGESNIVIGIGDKALKINWYRK

SEQ ID NO: 702 - protein, 99 aa, Artificial Sequence
  Dengue virus
KGMSYTMCSGKFSIDKEMAETQHGTTVVKVKYEGAGAPCKVPIEIRDVNKEKVVGRIISPTPFAENTNSVTNIELERPLDSYIVIGVGDSALTLHWFRK

SEQ ID NO: 703 - protein, 20 aa, Artificial Sequence
  Flavivirus envelope protein
CRVKMEKLQLKGTTYGVCSK

SEQ ID NO: 704 - protein, 20 aa, Artificial Sequence
  Flavivirus envelope protein
SRVKMEKLQLKGTTYGVCSK

SEQ ID NO: 705 - protein, 20 aa, Artificial Sequence
  Flavivirus envelope protein
CRVKMEKLQLKGTTYGVSSK

SEQ ID NO: 706 - protein, 20 aa, Artificial Sequence
  Flavivirus envelope protein
SRVKMEKLQLKGTTYGVSSK

SEQ ID NO: 707 - protein, 20 aa, Artificial Sequence
  Flavivirus envelope protein
CRVKMEKLQLKGTTYGVCSK

SEQ ID NO: 708 - protein, 20 aa, Artificial Sequence
  Flavivirus envelope protein
ARVKMEKLQLKGTTYGVCSK

SEQ ID NO: 709 - protein, 20 aa, Artificial Sequence
  Flavivirus envelope protein
CAVKMEKLQLKGTTYGVCSK

SEQ ID NO: 710 - protein, 20 aa, Artificial Sequence
  Flavivirus envelope protein
CRAKMEKLQLKGTTYGVCSK

SEQ ID NO: 711 - protein, 20 aa, Artificial Sequence
  Flavivirus envelope protein
CRVAMEKLQLKGTTYGVCSK

SEQ ID NO: 712 - protein, 20 aa, Artificial Sequence
  Flavivirus envelope protein
CRVKAEKLQLKGTTYGVCSK

SEQ ID NO: 713 - protein, 20 aa, Artificial Sequence
  Flavivirus envelope protein
CRVKMAKLQLKGTTYGVCSK

SEQ ID NO: 714 - protein, 20 aa, Artificial Sequence
  Flavivirus envelope protein
CRVKMEALQLKGTTYGVCSK

SEQ ID NO: 715 - protein, 20 aa, Artificial Sequence
  Flavivirus envelope protein
CRVKMEKAQLKGTTYGVCSK

SEQ ID NO: 716 - protein, 20 aa, Artificial Sequence
  Flavivirus envelope protein
CRVKMEKLALKGTTYGVCSK

SEQ ID NO: 717 - protein, 20 aa, Artificial Sequence
  Flavivirus envelope protein
CRVKMEKLQAKGTTYGVCSK

SEQ ID NO: 718 - protein, 20 aa, Artificial Sequence
  Flavivirus envelope protein
CRVKMEKLQLAGTTYGVCSK

SEQ ID NO: 719 - protein, 20 aa, Artificial Sequence
  Flavivirus envelope protein
CRVKMEKLQLKATTYGVCSK

SEQ ID NO: 720 - protein, 20 aa, Artificial Sequence
  Flavivirus envelope protein
CRVKMEKLQLKGATYGVCSK

SEQ ID NO: 721 - protein, 20 aa, Artificial Sequence
  Flavivirus envelope protein
CRVKMEKLQLKGTAYGVCSK

SEQ ID NO: 722 - protein, 20 aa, Artificial Sequence
  Flavivirus envelope protein
CRVKMEKLQLKGTTAGVCSK

SEQ ID NO: 723 - protein, 20 aa, Artificial Sequence
  Flavivirus envelope protein
CRVKMEKLQLKGTTYAVCSK

SEQ ID NO: 724 - protein, 20 aa, Artificial Sequence
  Flavivirus envelope protein
CRVKMEKLQLKGTTYGACSK

SEQ ID NO: 725 - protein, 20 aa, Artificial Sequence
  Flavivirus envelope protein
CRVKMEKLQLKGTTYGVASK

SEQ ID NO: 726 - protein, 20 aa, Artificial Sequence
  Flavivirus envelope protein
CRVKMEKLQLKGTTYGVCAK

SEQ ID NO: 727 - protein, 20 aa, Artificial Sequence
  Flavivirus envelope protein
CRVKMEKLQLKGTTYGVCSA

SEQ ID NO: 728 - protein, 20 aa, Artificial Sequence
  Flavivirus envelope protein
CRVKMEKLQLKGTTYGVCSK

SEQ ID NO: 729 - protein, 20 aa, Artificial Sequence
  Flavivirus envelope protein
SNTVKLTSGHLKCRVKMEKL

SEQ ID NO: 730 - protein, 20 aa, Artificial Sequence
  Flavivirus envelope protein
NTVKLTSGHLKCRVKMEKLQ

SEQ ID NO: 731 - protein, 20 aa, Artificial Sequence
  Flavivirus envelope protein
TVKLTSGHLKCRVKMEKLQL

SEQ ID NO: 732 - protein, 20 aa, Artificial Sequence
  Flavivirus envelope protein
VKLTSGHLKCRVKMEKLQLK

SEQ ID NO: 733 - protein, 20 aa, Artificial Sequence
  Flavivirus envelope protein
KLTSGHLKCRVKMEKLQLKG

SEQ ID NO: 734 - protein, 20 aa, Artificial Sequence
  Flavivirus envelope protein
LTSGHLKCRVKMEKLQLKGT

SEQ ID NO: 735 - protein, 20 aa, Artificial Sequence
  Flavivirus envelope protein
TSGHLKCRVKMEKLQLKGTT

SEQ ID NO: 736 - protein, 20 aa, Artificial Sequence
  Flavivirus envelope protein
SGHLKCRVKMEKLQLKGTTY

SEQ ID NO: 737 - protein, 20 aa, Artificial Sequence
  Flavivirus envelope protein
GHLKCRVKMEKLQLKGTTYG

SEQ ID NO: 738 - protein, 20 aa, Artificial Sequence
  Flavivirus envelope protein
HLKCRVKMEKLQLKGTTYGV

SEQ ID NO: 739 - protein, 20 aa, Artificial Sequence
  Flavivirus envelope protein
LKCRVKMEKLQLKGTTYGVC

SEQ ID NO: 740 - protein, 20 aa, Artificial Sequence
  Flavivirus envelope protein
KCRVKMEKLQLKGTTYGVCS

SEQ ID NO: 741 - protein, 20 aa, Artificial Sequence
  Flavivirus envelope protein
CRVKMEKLQLKGTTYGVCSK

SEQ ID NO: 742 - protein, 20 aa, Artificial Sequence
  Flavivirus envelope protein
RVKMEKLQLKGTTYGVCSKA

SEQ ID NO: 743 - protein, 20 aa, Artificial Sequence
  Flavivirus envelope protein
VKMEKLQLKGTTYGVCSKAF

SEQ ID NO: 744 - protein, 20 aa, Artificial Sequence
  Flavivirus envelope protein
KMEKLQLKGTTYGVCSKAFK

SEQ ID NO: 745 - protein, 20 aa, Artificial Sequence
  Flavivirus envelope protein
MEKLQLKGTTYGVCSKAFKF

SEQ ID NO: 746 - protein, 20 aa, Artificial Sequence
  Flavivirus envelope protein
EKLQLKGTTYGVCSKAFKFL

SEQ ID NO: 747 - protein, 20 aa, Artificial Sequence
  Flavivirus envelope protein
KLQLKGTTYGVCSKAFKFLG

SEQ ID NO: 748 - protein, 20 aa, Artificial Sequence
  Flavivirus envelope protein
LQLKGTTYGVCSKAFKFLGT

SEQ ID NO: 749 - protein, 20 aa, Artificial Sequence
  Flavivirus envelope protein
QLKGTTYGVCSKAFKFLGTP

SEQ ID NO: 750 - protein, 20 aa, Artificial Sequence
  Flavivirus envelope protein
LKGTTYGVCSKAFKFLGTPA

SEQ ID NO: 751 - protein, 20 aa, Artificial Sequence
  Flavivirus envelope protein
KGTTYGVCSKAFKFLGTPAD

SEQ ID NO: 752 - protein, 20 aa, Artificial Sequence
  Flavivirus envelope protein
GTTYGVCSKAFKFLGTPADT

SEQ ID NO: 753 - protein, 20 aa, Artificial Sequence
  Flavivirus envelope protein
TTYGVCSKAFKFLGTPADTG

SEQ ID NO: 754 - protein, 20 aa, Artificial Sequence
  Flavivirus envelope protein
TYGVCSKAFKFLGTPADTGH

SEQ ID NO: 755 - DNA, 2760 bp, Artificial Sequence
  STF2.OVA
atggcacaagtaatcaacactaacagtctgtcgctgctgacccagaataacctgaacaaatcccagtccgcactgggcaccgctatcgagcgtctgtcttctggtctgcgtatcaacagcgcgaaagacgatgcggcaggtcaggcgattgctaaccgtttcaccgcgaacatcaaaggtctgactcaggcttcccgtaacgctaacgacggtatctccattgcgcagaccactgaaggcgcgctgaacgaaatcaacaacaacctgcagcgtgtgcgtgaactggcggttcagtctgctaacagcaccaactcccagtctgacctcgactccatccaggctgaaatcacccagcgcctgaacgaaatcgaccgtgtatccggccagactcagttcaacggcgtgaaagtcctggcgcaggacaacaccctgaccatccaggttggcgccaacgacggtgaaactatcgatatcgatctgaagcagatcaactctcagaccctgggtctggactcactgaacgtgcagaaagcgtatgatgtgaaagatacagcagtaacaacgaaagcttatgccaataatggtactacactggatgtatcgggtcttgatgatgcagctattaaagcggctacgggtggtacgaatggtacggcttctgtaaccggtggtgcggttaaatttgacgcagataataacaagtactttgttactattggtggctttactggtgctgatgccgccaaaaatggcgattatgaagttaacgttgctactgacggtacagtaacccttgcggctggcgcaactaaaaccacaatgcctgctggtgcgacaactaaaacagaagtacaggagttaaaagatacaccggcagttgtttcagcagatgctaaaaatgccttaattgctggcggcgttgacgctaccgatgctaatggcgctgagttggtcaaaatgtcttataccgataaaaatggtaagacaattgaaggcggttatgcgcttaaagctggcgataagtattacgccgcagattacgatgaagcgacaggagcaattaaagctaaaaccacaagttatactgctgctgacggcactaccaaaacagcggctaaccaactgggtggcgtagacggtaaaaccgaagtcgttactatcgacggtaaaacctacaatgccagcaaagccgctggtcatgatttcaaagcacaaccagagctggcggaagcagccgctaaaaccaccgaaaacccgctgcagaaaattgatgccgcgctggcgcaggtggatgcgctgcgctctgatctgggtgcggtacaaaaccgtttcaactctgctatcaccaacctgggcaataccgtaaacaatctgtctgaagcgcgtagccgtatcgaagattccgactacgcgaccgaagtttccaacatgtctcgcgcgcagattttgcagcaggccggtacttccgttctggcgcaggctaaccaggtcccgcagaacgtgctgtctctgttacgtctcgagggctccatcggcgcagcaagcatggaattttgttttgatgtattcaaggagctcaaagtccaccatgccaatgagaacatcttctactgccccattgccatcatgtcagctctagccatggtatacctgggtgcaaaagacagcaccaggacacaaataaataaggttgttcgctttgataaacttccaggattcggagacagtattgaagctcagtgtggcacatctgtaaacgttcactcttcacttagagacatcctcaaccaaatcaccaaaccaaatgatgtttattcgttcagccttgccagtagactttatgctgaagagagatacccaatcctgccagaatacttgcagtgtgtgaaggaactgtatagaggaggcttggaacctatcaactttcaaacagctgcagatcaagccagagagctcatcaattcctgggtagaaagtcagacaaatggaattatcagaaatgtccttcagccaagctccgtggattctcaaactgcaatggttctggttaatgccattgtcttcaaaggactgtgggagaaagcatttaaggatgaagacacacaagcaatgcctttcagagtgactgagcaagaaagcaaacctgtgcagatgatgtaccagattggtttatttagagtggcatcaatggcttctgagaaaatgaagatcctggagcttccatttgccagtgggacaatgagcatgttggtgctgttgcctgatgaagtctcaggccttgagcagcttgagagtataatcaactttgaaaaactgactgaatggaccagttctaatgttatggaagagaggaagatcaaagtgtacttacctcgcatgaagatggaggaaaaatacaacctcacatctgtcttaatggctatgggcattactgacgtgtttagctcttcagccaatctgtctggcatctcctcagcagagagcctgaagatatctcaagctgtccatgcagcacatgcagaaatcaatgaagcaggcagagaggtggtagggtcagcagaggctggagtggatgctgcaagcgtctctgaagaatttagggctgaccatccattcctcttctgtatcaagcacatcgcaaccaacgccgttctcttctttggcagatgtgtttccccttcgaagcttgaaggtaagcctatccctaaccctctcctcggtctcgattctacgcgtaccggtcatcatcaccatcaccat

SEQ ID NO: 756 - protein, 920 aa, Artificial Sequence
  STF2.OVA
MAQVINTNSLSLLTQNNLNKSQSALGTAIERLSSGLRINSAKDDAAGQAIANRFTANIKGLTQASRNANDGISIAQTTEGALNEINNNLQRVRELAVQSANSTNSQSDLDSIQAEITQRLNEIDRVSGQTQFNGVKVLAQDNTLTIQVGANDGETIDIDLKQINSQTLGLDSLNVQKAYDVKDTAVTTKAYANNGTTLDVSGLDDAAIKAATGGTNGTASVTGGAVKFDADNNKYFVTIGGFTGADAAKNGDYEVNVATDGTVTLAAGATKTTMPAGATTKTEVQELKDTPAVVSADAKNALIAGGVDATDANGAELVKMSYTDKNGKTIEGGYALKAGDKYYAADYDEATGAIKAKTTSYTAADGTTKTAANQLGGVDGKTEVVTIDGKTYNASKAAGHDFKAQPELAEAAAKTTENPLQKIDAALAQVDALRSDLGAVQNRFNSAITNLGNTVNNLSEARSRIEDSDYATEVSNMSRAQILQQAGTSVLAQANQVPQNVLSLLRLEGSIGAASMEFCFDVFKELKVHHANENIFYCPIAIMSALAMVYLGAKDSTRTQINKVVRFDKLPGFGDSIEAQCGTSVNVHSSLRDILNQITKPNDVYSFSLASRLYAEERYPILPEYLQCVKELYRGGLEPINFQTAADQARELINSWVESQTNGIIRNVLQPSSVDSQTAMVLVNAIVFKGLWEKAFKDEDTQAMPFRVTEQESKPVQMMYQIGLFRVASMASEKMKILELPFASGTMSMLVLLPDEVSGLEQLESIINFEKLTEWTSSNVMEERKIKVYLPRMKMEEKYNLTSVLMAMGITDVFSSSANLSGISSAESLKISQAVHAAHAEINEAGREVVGSAEAGVDAASVSEEFRADHPFLFCIKHIATNAVLFFGRCVSPSKLEGKPIPNPLLGLDSTRTGHHHHHH

SEQ ID NO: 757 - protein, 385 aa, Artificial Sequence
  OVA
GSIGAASMEFCFDVFKELKVHHANENIFYCPIAIMSALAMVYLGAKDSTRTQINKVVRFDKLPGFGDSIEAQCGTSVNVHSSLRDILNQITKPNDVYSFSLASRLYAEERYPILPEYLQCVKELYRGGLEPINFQTAADQARELINSWVESQTNGIIRNVLQPSSVDSQTAMVLVNAIVFKGLWEKAFKDEDTQAMPFRVTEQESKPVQMMYQIGLFRVASMASEKMKILELPFASGTMSMLVLLPDEVSGLEQLESIINFEKLTEWTSSNVMEERKIKVYLPRMKMEEKYNLTSVLMAMGITDVFSSSANLSGISSAESLKISQAVHAAHAEINEAGREVVGSAEAGVDAASVSEEFRADHPFLFCIKHIATNAVLFFGRCVSP

SEQ ID NO: 758 - DNA, 1156 bp, Artificial Sequence
  OVA
gggctccatcggcgcagcaagcatggaattttgttttgatgtattcaaggagctcaaagtccaccatgccaatgagaacatcttctactgccccattgccatcatgtcagctctagccatggtatacctgggtgcaaaagacagcaccaggacacaaataaataaggttgttcgctttgataaacttccaggattcggagacagtattgaagctcagtgtggcacatctgtaaacgttcactcttcacttagagacatcctcaaccaaatcaccaaaccaaatgatgtttattcgttcagccttgccagtagactttatgctgaagagagatacccaatcctgccagaatacttgcagtgtgtgaaggaactgtatagaggaggcttggaacctatcaactttcaaacagctgcagatcaagccagagagctcatcaattcctgggtagaaagtcagacaaatggaattatcagaaatgtccttcagccaagctccgtggattctcaaactgcaatggttctggttaatgccattgtcttcaaaggactgtgggagaaagcatttaaggatgaagacacacaagcaatgcctttcagagtgactgagcaagaaagcaaacctgtgcagatgatgtaccagattggtttatttagagtggcatcaatggcttctgagaaaatgaagatcctggagcttccatttgccagtgggacaatgagcatgttggtgctgttgcctgatgaagtctcaggccttgagcagcttgagagtataatcaactttgaaaaactgactgaatggaccagttctaatgttatggaagagaggaagatcaaagtgtacttacctcgcatgaagatggaggaaaaatacaacctcacatctgtcttaatggctatgggcattactgacgtgtttagctcttcagccaatctgtctggcatctcctcagcagagagcctgaagatatctcaagctgtccatgcagcacatgcagaaatcaatgaagcaggcagagaggtggtagggtcagcagaggctggagtggatgctgcaagcgtctctgaagaatttagggctgaccatccattcctcttctgtatcaagcacatcgcaaccaacgccgttctcttctttggcagatgtgtttcccct

SEQ ID NO: 759 - DNA, 18 bp, Artificial Sequence
  Primer
catctcagtgcaactaaa

SEQ ID NO: 760 - DNA, 18 bp, Artificial Sequence
  Primer
tagaaggcacagtcgagg

SEQ ID NO: 761 - DNA, 2736 bp, Artificial Sequence
  STF2.E
atggcacaagtaatcaacactaacagtctgtcgctgctgacccagaataacctgaacaaatcccagtccgcactgggcaccgctatcgagcgtctgtcttctggtctgcgtatcaacagcgcgaaagacgatgcggcaggtcaggcgattgctaaccgtttcaccgcgaacatcaaaggtctgactcaggcttcccgtaacgctaacgacggtatctccattgcgcagaccactgaaggcgcgctgaacgaaatcaacaacaacctgcagcgtgtgcgtgaactggcggttcagtctgctaacagcaccaactcccagtctgacctcgactccatccaggctgaaatcacccagcgcctgaacgaaatcgaccgtgtatccggccagactcagttcaacggcgtgaaagtcctggcgcaggacaacaccctgaccatccaggttggcgccaacgacggtgaaactatcgatatcgatctgaagcagatcaactctcagaccctgggtctggactcactgaacgtgcagaaagcgtatgatgtgaaagatacagcagtaacaacgaaagcttatgccaataatggtactacactggatgtatcgggtcttgatgatgcagctattaaagcggctacgggtggtacgaatggtacggcttctgtaaccggtggtgcggttaaatttgacgcagataataacaagtactttgttactattggtggctttactggtgctgatgccgccaaaaatggcgattatgaagttaacgttgctactgacggtacagtaacccttgcggctggcgcaactaaaaccacaatgcctgctggtgcgacaactaaaacagaagtacaggagttaaaagatacaccggcagttgtttcagcagatgctaaaaatgccttaattgctggcggcgttgacgctaccgatgctaatggcgctgagttggtcaaaatgtcttataccgataaaaatggtaagacaattgaaggcggttatgcgcttaaagctggcgataagtattacgccgcagattacgatgaagcgacaggagcaattaaagctaaaaccacaagttatactgctgctgacggcactaccaaaacagcggctaaccaactgggtggcgtagacggtaaaaccgaagtcgttactatcgacggtaaaacctacaatgccagcaaagccgctggtcatgatttcaaagcacaaccagagctggcggaagcagccgctaaaaccaccgaaaacccgctgcagaaaattgatgccgcgctggcgcaggtggatgcgctgcgctctgatctgggtgcggtacaaaaccgtttcaactctgctatcaccaacctgggcaataccgtaaacaatctgtctgaagcgcgtagccgtatcgaagattccgactacgcgaccgaagtttccaacatgtctcgcgcgcagattttgcagcaggccggtacttccgttctggcgcaggctaaccaggtcccgcagaacgtgctgtctctgttacgtttcaactgccttggaatgagcaacagagacttcttggaaggagtgtctggagcaacatgggtggatttggttctcgaaggcgacagctgcgtgactatcatgtctaaggacaagcctaccatcgatgtgaagatgatgaatatggaggcggccaacctggcagaggtccgcagttattgctatttggctaccgtcagcgatctctccaccaaagctgcgtgcccgaccatgggagaagctcacaatgacaaacgtgctgacccagcttttgtgtgcagacaaggagtggtggacaggggctggggcaacggctgcggactatttggcaaaggaagcattgacacatgcgccaaatttgcctgctctaccaaggcaataggaagaaccatcttgaaagagaatatcaagtacgaagtggccatttttgtccatggaccaactactgtggagtcgcacggaaactactccacacaggttggagccactcaggcagggagattcagcatcactcctgcagcgccttcatacacactaaagcttggagaatatggagaggtgacagtggactgtgaaccacggtcagggattgacaccaatgcatactacgtgatgactgttggaacaaagacgttcttggtccatcgtgagtggttcatggacctcaacctcccttggagcagtgctggaagtactgtgtggaggaacagagagacgttaatggagtttgaggaaccacacgccacgaagcagtctgtgatagcattgggctcacaagagggagctctgcatcaagctttggctggagccattcctgtggaattttcaagcaacactgtcaagttgacgtcgggtcatttgaagtgtagagtgaagatggaaaaattgcagttgaagggaacaacctatggcgtctgttcaaaggctttcaagtttcttgggactcccgcagacacaggtcacggcactgtggtgttggaattgcagtacactggcacggatggaccttgcaaagttcctatctcgtcagtggcttcattgaacgacctaacgccagtgggcagattggtcactgtcaacccttttgtttcagtggccacggccaacgctaaggtcctgattgaattggaaccaccctttggagactcatacatagtggtgggcagaggagaacaacagatcaatcaccattggcacaagtctggaagcagcattggcaaa

SEQ ID NO: 762 - protein, 912 aa, Artificial Sequence
  STF2.E
MAQVINTNSLSLLTQNNLNKSQSALGTAIERLSSGLRINSAKDDAAGQAIANRFTANIKGLTQASRNANDGISIAQTTEGALNEINNNLQRVRELAVQSANSTNSQSDLDSIQAEITQRLNEIDRVSGQTQFNGVKVLAQDNTLTIQVGANDGETIDIDLKQINSQTLGLDSLNVQKAYDVKDTAVTTKAYANNGTTLDVSGLDDAAIKAATGGTNGTASVTGGAVKFDADNNKYFVTIGGFTGADAAKNGDYEVNVATDGTVTLAAGATKTTMPAGATTKTEVQELKDTPAVVSADAKNALIAGGVDATDANGAELVKMSYTDKNGKTIEGGYALKAGDKYYAADYDEATGAIKAKTTSYTAADGTTKTAANQLGGVDGKTEVVTIDGKTYNASKAAGHDFKAQPELAEAAAKTTENPLQKIDAALAQVDALRSDLGAVQNRFNSAITNLGNTVNNLSEARSRIEDSDYATEVSNMSRAQILQQAGTSVLAQANQVPQNVLSLLRFNCLGMSNRDFLEGVSGATWVDLVLEGDSCVTIMSKDKPTIDVKMMNMEAANLAEVRSYCYLATVSDLSTKAACPTMGEAHNDKRADPAFVCRQGVVDRGWGNGCGLFGKGSIDTCAKFACSTKAIGRTILKENIKYEVAIFVHGPTTVESHGNYSTQVGATQAGRFSITPAAPSYTLKLGEYGEVTVDCEPRSGIDTNAYYVMTVGTKTFLVHREWFMDLNLPWSSAGSTVWRNRETLMEFEEPHATKQSVIALGSQEGALHQALAGAIPVEFSSNTVKLTSGHLKCRVKMEKLQLKGTTYGVCSKAFKFLGTPADTGHGTVVLELQYTGTDGPCKVPISSVASLNDLTPVGRLVTVNPFVSVATANAKVLIELEPPFGDSYIVVGRGEQQINHHWHKSGSSIGK

SEQ ID NO: 763 - protein, 495 aa, Artificial Sequence
  Dengue 1
MRCVGIGNRDFVEGLSGATWVDVVLEHGSCVTTMAKNKPTLDIELLKTEVTNPAVLRKLCIEAKISNTTTDSRCPTQGEATLVEEQDANFVCRRTFVDRGWGNGCGLFGKGSLITCAKFKCVTKLEGKIAQYENLKYSVIVTVHTGDQHQVGNETTEHGTTATITPQAPTSEIQLTDYGTLTLDCSPRTGLDFNEMVLLTMKKKSWLVHKQWFLDLPLPWTSGALTSQETWNRQDLLVTFKTAHAKKQEVVVLGSQEGAMHTALTGATEIQTSGTTTIFAGHLKCRLKMDKLTLKGMSYVMCTGSFKLEKEVAETQHGTVLVQVKYEGTDAPCKIPFSTQDEKGATQNGRLITANPIVTDKEKPVNIEAEPPFGESYIVVGAGEKALKLSWFKKGSSIGKMFEATARGARRMAILGDTAWDFGSIGGVFTSMGKLVHQVFGTAYGVLFSGVSWTMKIGIGILLTWLGLNSRNTSLSVMCIAVGMVTLYLGVMVQA

SEQ ID NO: 764 - DNA, 1485 bp, Artificial Sequence
  Dengue 1
atgcgatgcgtgggaataggcaacagagacttcgtggaaggactgtcaggagcaacatgggtggatgtggtactggagcatggaagttgcgtcaccaccatggcaaaaaacaaaccaacactggacattgaactcttgaagacggaggtcacaaaccctgcagttctgcgtaaattgtgcattgaagctaaaatatcaaacaccaccaccgattcgagatgtccaacacaaggagaagccacactggtggaagaacaagacgcgaactttgtgtgccgacgaacgttcgtggacagaggctggggcaatggctgtgggctattcggaaaaggtagtctaataacgtgtgccaagtttaagtgtgtgacaaaactagaaggaaagatagctcaatatgaaaacctaaaatattcagtgatagtcaccgtccacactggagatcagcaccaggtgggaaatgagactacagaacatggaacaactgcaaccataacacctcaagctcctacgtcggaaatacagctgaccgactacggaacccttacattagattgttcacctaggacagggctagattttaacgagatggtgttgctgacaatgaaaaagaaatcatggcttgtccacaaacagtggtttctagacttaccactgccttggacctctggggctttaacatcccaagagacttggaacagacaagatttactggtcacatttaagacagctcatgcaaagaagcaggaagtagtcgtactaggatcacaagaaggagcaatgcacactgcgctgactggagcgacagaaatccaaacgtcaggaacgacaacaattttcgcaggacacctaaaatgcagactaaaaatggacaaactaactttaaaagggatgtcatatgtgatgtgcacaggctcattcaagttagagaaagaagtggctgagacccagcatggaactgttctggtgcaggttaaatatgaaggaacagacgcaccatgcaagattcccttttcgacccaagatgagaaaggagcaacccagaatgggagattaataacagccaaccccatagtcactgacaaagaaaaaccagtcaatattgaggcagaaccaccctttggtgagagctacatcgtggtaggagcaggtgaaaaagctttgaaactaagctggttcaagaaaggaagcagcatagggaaaatgtttgaagcaactgcccgaggagcacgaaggatggccattctgggagacaccgcatgggacttcggttctataggaggagtgttcacgtctatgggaaaactggtacaccaggtttttggaactgcatatggagttttgtttagcggagtttcttggaccatgaaaataggaatagggattctgctgacatggctaggattaaattcaaggaacacgtccctttcggtgatgtgcatcgcagttggcatggtcacactgtacctaggagtcatggttcaggca

SEQ ID NO: 765 - protein, 495 aa, Artificial Sequence
  Dengue 2
MRCIGMSNRDFVEGVSGGSWVDIVLEHGSCVTTMAKNKPTLDFELIKTEAKQPATLRKYCIEAKLTNTTTESRCPTQGEPSLNEEQDKRFVCKHSMVDRGWGNGCGLFGKGGIVTCAMFRCKKNMEGKVVQPENLEYTIVITPHSGEEHAVGNDTGKHGKEIKITPQSSTTEAELTGYGTVTMECSPRTGLDFNEMVLLQMENKAWLVHRQWFLDLPLPWLPGADTQGSNWIQKETLVTFKNPHAKKQDVVVLGSQEGAMHTALTGATEIQMSSGNLLFTGHLKCRLRMDKLQLKGMSYSMCTGKFKVVKEIAETQHGTIVIRVQYEGDGSPCKIPFEIMDLEKRHVLGRLITVNPIVTEKDSPVNIEAEPPFGDSYIIIGVEPGQLKLNWFKKGSSIGQMFETTMRGAKRMAILGDTAWDFGSLGGVFTSIGKALHQVFGAIYGAAFSGVSWTMKILIGVIITWIGMNSRSTSLSVTLVLVGIVTLYLGVMVQA

SEQ ID NO: 766 - DNA, 1485 bp, Artificial Sequence
  Dengue 2
atgcgttgcataggaatgtcaaatagagactttgtggaaggggtttcaggaggaagctgggttgacatagtcttagaacatggaagctgtgtgacgacgatggcaaaaaacaaaccaacattggattttgaactgataaaaacagaagccaaacagcctgccaccctaaggaagtactgtatagaggcaaagctaaccaacacaacaacagaatctcgctgcccaacacaaggggaacccagcctaaatgaagagcaggacaaaaggttcgtctgcaaacactccatggtagacagaggatggggaaatggatgtggactatttggaaagggaggcattgtgacctgtgctatgttcagatgcaaaaagaacatggaaggaaaagttgtgcaaccagaaaacttggaatacaccattgtgataacacctcactcaggggaagagcatgcagtcggaaatgacacaggaaaacatggcaaggaaatcaaaataacaccacagagttccaccacagaagcagaattgacaggttatggcactgtcacaatggagtgctctccaagaacgggcctcgacttcaatgagatggtgttgctgcagatggaaaataaagcttggctggtgcacaggcaatggttcctagacctgccgttaccatggttgcccggagcggacacacaagggtcaaattggatacagaaagagacattggtcactttcaaaaatccccatgcgaagaaacaggatgttgttgttttaggatcccaagaaggggccatgcacacagcacttacaggggccacagaaatccaaatgtcatcaggaaacttactcttcacaggacatctcaagtgcaggctgagaatggacaagctacagctcaaaggaatgtcatactctatgtgcacaggaaagtttaaagttgtgaaggaaatagcagaaacacaacatggaacaatagttatcagagtgcaatatgaaggggacggctctccatgcaagatcccttttgagataatggatttggaaaaaagacatgtcttaggtcgcctgattacagtcaacccaattgtgacagaaaaagatagcccagtcaacatagaagcagaacctccattcggagacagctacatcatcataggagtagagccgggacaactgaagctcaactggtttaagaaaggaagttctatcggccaaatgtttgagacaacaatgaggggggcgaagagaatggccattttaggtgacacagcctgggattttggatccttgggaggagtgtttacatctataggaaaggctctccaccaagtctttggagcaatctatggagctgccttcagtggggtttcatggactatgaaaatcctcataggagtcattatcacatggataggaatgaattcacgcagcacctcactgtctgtgacactagtattggtgggaattgtgacactgtatttgggagtcatggtgcaggcc

SEQ ID NO: 767 - protein, 493 aa, Artificial Sequence
  Dengue 3
MRCVGVGNRDFVEGLSGATWVDVVLEHGGCVTTMAKNKPTLDIELQKTEATQLATLRKLCIEGKITNITTDSRCPTQGEAILPEEQDQNYVCKHTYVDRGWGNGCGLFGKGSLVTCAKFQCLEPIEGKVVQHENLKYTVIITVHTGDQHQVGNDTQGVTVEITPQASTVEAILPEYGTLGLECSPRTGLDFNEMILLTMKNKAWMVHRQWFFDLPLPWTSGATTETPTWNRKELLVTFKNAHAKKQEVVVLGSQEGAMHTALTGATEIQNSGGTSIFAGHLKCRLKMDKLELKGMSYAMCLNTFVLKKEVSETQHGTILIKVEYKGEDAPCKIPFSTEDGQGKAHNGRLITANPVVTKKEEPVNIEAEPPFGESNIVIGIGDKALKINWYKKGSSIGKMFEATARGARRMAILGDTAWDFGSVGGVLNSLGKMVHQIFGSAYTALFSGVSWIMKIGIGVLLTWIGLNSKNTSMSFSCIAIGIITLYLGAVVQA

SEQ ID NO: 768 - DNA, 1479 bp, Artificial Sequence
  Dengue 3
atgagatgcgtgggagtaggaaacagagattttgtggaaggtctgtcgggagctacgtgggttgatgtggtgctcgagcacggagggtgtgtgaccaccatggctaagaacaagcctacgctggacatagagctccagaagaccgaggccacccaactggcgaccctaagaaagttatgcattgagggaaaaattaccaacataacaactgactcaaggtgtcctacccagggggaagcgattttacctgaggagcaggaccagaactacgtatgtaagcacacatacgtggatagaggttggggaaacggttgtggtttgtttggaaaaggaagcttggtgacatgcgcgaaatttcaatgtctagaaccaatagagggaaaagtggtgcaacatgagaacctcaaatacactgtcatcatcacagtgcacacaggagaccaacaccaggtgggaaatgacacgcagggagtcacggttgagataacaccccaggcatcaaccgttgaagctatcttgcctgaatatggaacccttgggctagaatgttcaccacggacaggtttggatttcaacgaaatgattttattgacaatgaagaacaaagcatggatggtacataggcaatggttctttgacctacccctaccatggacatcaggagctacaacagagacaccaacttggaacaggaaagagctccttgtgacattcaagaatgcacatgcaaaaaagcaagaagtagttgtccttggatcgcaagagggagcaatgcacacagcgctgacaggagctacagagattcaaaactcaggaggtacaagcatttttgcggggcacttgaaatgtagacttaagatggacaaattggaactcaaggggatgagctatgcaatgtgcttgaatacctttgtgttgaagaaagaagtctctgaaacgcagcatgggacaatactcatcaaggttgagtacaaaggggaagatgcaccttgcaagattcctttctccacagaggatggacaagggaaagctcacaatggtagactgatcacagccaacccagtggtgaccaagaaggaggagcctgtcaacattgaggctgaacctccttttggggaaagtaacatagtgattgggattggagacaaagccttgaaaattaactggtacaagaagggaagctcgattggaaagatgttcgaggctactgccagaggtgcaaggcgcatggccatcttgggagacacagcctgggattttggttcagtgggtggtgttctgaattcattagggaaaatggtacaccaaatattcggaagtgcttacacagccctgtttagtggagtctcatggataatgaaaattggaataggtgtcctcttaacctggatagggttgaattcaaaaaacacttccatgtcattttcatgcattgcgataggaattattacactctatctgggagccgtggtacaagct

SEQ ID NO: 769 - protein, 491 aa, Artificial Sequence
  Dengue 4
MRCVGVGNRDFVEGVSGGAWVDLVLEHGGCVTTMAQGKPTLDFELTKTTAKEVALLRTYCIEASISNITTATRCPTQGEPYLKEEQDQQYICRRDVVDRGWGNGCGLFGKGGVVTCAKFSCSGKITGNLVRIENLEYTVVVTVHNGDTHAVGNDTSNHGVTAMITPRSPSVEVKLPDYGELTLDCEPRSGIDFNEMILMKMKKKTWLVHKQWFLDLPLPWTAGADTSEVHWNYKERMVTFKVPHAKRQDVTVLGSQEGAMHSALAGATEVDSGDGNHMFAGHLKCEVRMEKLRIKGMSYTMCSGKFSIDKEMAETQHGTTVVKVKYEGAGAPCKVPIEIRDVNKEKVVGRIISSTPLAENTNSVTNIELEPPFGDSYIVIGVGNSALTLHWFRKGSSIGKMFESTYRGAKRMAILGETAWDFGSVGGLFTSLGKAVHQVFGSVYTTMFGGVSWMIRILIGFLVLWIGTNSRNTSMAMTCIAVGGITLFLGF

SEQ ID NO: 770 - DNA, 1473 bp, Artificial Sequence
  Dengue 4
atgcgatgcgtaggagtaggaaacagagactttgtggaaggagtctcaggtggagcatgggtcgacctggtgctagaacatggaggatgcgtcacaaccatggcccagggaaaaccaaccttggattttgaactgaccaagacaacagccaaggaagtggctctgttaagaacctattgcattgaagcctcaatatcaaacataactacggcaacaagatgtccaacgcaaggagagccttatctgaaagaggaacaggaccaacagtacatttgccggagagatgtggtagacagagggtggggcaatggctgtggcttgtttggaaaaggaggagttgtgacatgtgcgaagttttcatgttcggggaagataacaggcaatttggtccgaattgagaaccttgaatacacagtggtggtaacagtccacaatggagacacccatgcagtaggaaatgacacatccaatcatggagttacagccatgataacccccaggtcaccatcggtggaagtcaaattgccggactatggagaactaacactcgattgtgaacccaggtctggaattgactttaatgagatgattctgatgaaaatgaaaaagaaaacatggctcgtgcataagcaatggtttttggatctgcctcttccatggacagcaggagcagacacatcagaggttcactggaattacaaagagagaatggtgacatttaaggttcctcatgccaagagacaggatgtgacagtgctgggatctcaggaaggagccatgcattctgccctcgctggagccacagaagtggactccggtgatggaaatcacatgtttgcaggacatctcaagtgcgaagtccgtatggagaaattgagaatcaagggaatgtcatacacgatgtgttcaggaaagttttcaattgacaaagagatggcagaaacacagcatgggacaacagtggtgaaagtcaagtatgaaggtgctggagctccgtgtaaagtccccatagagataagagatgtaaacaaggaaaaagtggttgggcgtatcatctcatccacccctttggctgagaataccaacagtgtaaccaacatagaattagaacccccctttggggacagctacatagtgataggtgttggaaacagcgcattaacactccattggttcaggaaagggagttccattggcaagatgtttgagtccacatacagaggtgcaaaacgaatggccattctaggtgaaacagcttgggattttggttccgttggtggattgttcacatcattgggaaaggctgtgcaccaggtttttggaagtgtgtatacaaccatgtttggaggagtctcatggatgattagaatcctaattgggttcttagtgttgtggattggcacgaactcaaggaacacttcaatggctatgacgtgcatagctgttggaggaatcactctgtttctgggcttc

SEQ ID NO: 771 - protein, 20 aa, Artificial Sequence
  West Nile virus
LTSGHLKCRVKMEKLQLKGT

SEQ ID NO: 772 - protein, 20 aa, Artificial Sequence
  West Nile virus
LTSGHLKCRVKMEKLQLKGT

SEQ ID NO: 773 - DNA, 1217 bp, Artificial Sequence
  Japanese encephalitis
tttaattgtctgggaatgggcaatcgtgacttcatagaaggagccagtggagccgcttgggtgacttggtgctagaaggagacagctgcttgacaatcatggcaaacgacaaaccaacattggacgtccgcatgattaacatcgaagctagccaacttgctgaggtcagaagttactgctatcatgcttcagtcactgacatctcgacggtggctcggtgccccacgactggagaagcccacaacgagaagcgagctgatagtagctatgtgtgcaaacaaggcttcactgaccgtgggtggggcaacggatgtggatttttcgggaagggaagcattgacacatgtgcaaaattctcctgcaccagtaaagcgattgggagaacaatccagccagaaaacatcaaatacaaagttggcatttttgtgcatggaaccaccacttcggaaaaccatgggaattattcagcgcaagttggggcgtcccaggcggcaaagtttacagtaacacccaatgctccttcggtagccctcaaacttggtgactacggagaagtcacactggactgtgagccaaggagtggactgaacactgaagcgttttacgtcatgaccgtggggtcaaagtcatttctggtccatagggagtggtttcatgacctcgctctcccctggacgtccccttcgagcacagcgtggagaaacagagaactcctcatggaatttgaaggggcgcacgccacaaaacagtccgttgttgctcttgggtcacaggaaggaggcctccatcatgcgttggcaggagccatcgtggtggagtactcaagctcagtgatgttaacatcaggccacctgaaatgtaggctgaaaatggacaaactggctctgaaaggcacaacctatggcatgtgtacagaaaaattctcgttcgcgaaaaatccggtggacactggtcacggaacagttgtcattgaactctcctactctgggagtgatggcccctgcaaaattccgattgtttccgttgcgagcctcaatgacatgacccccgttgggcggctggtgacagtgaaccccttcgtcgcgacttccagtgccaactcaaaggtgctggtcgagatggaaccccccttcggagactcctacatcgtagttggaaggggagacaagcagatcaaccaccattggcacaaagctggaagcacgctgggcaaggcc

SEQ ID NO: 774 - protein, 406 aa, Artificial Sequence
  Japanese encephalitis
FNCLGMGNRDFIEGASGAAWVDLVLEGDSCLTIMANDKPTLDVRMINIEASQLAEVRSYCYHASVTDISTVARCPTTGEAHNEKRADSSYVCKQGFTDRGWGNGCGFFGKGSIDTCAKFSCTSKAIGRTIQPENIKYKVGIFVHGTTTSENHGNYSAQVGASQAAKFTVTPNAPSVALKLGDYGEVTLDCEPRSGLNTEAFYVMTVGSKSFLVHREWFHDLALPWTSPSSTAWRNRELLMEFEGAHATKQSVVALGSQEGGLHHALAGAIVVEYSSSVMLTSGHLKCRLKMDKLALKGTTYGMCTEKFSFAKNPVDTGHGTVVIELSYSGSDGPCKIPIVSVASLNDMTPVGRLVTVNPFVATSSANSKVLVEMEPPFGDSYIVVGRGDKQINHHWHKAGSTLGKA

SEQ ID NO: 775 - protein, 5 aa, Artificial Sequence
  West Nile virus
MEKLQ

SEQ ID NO: 776 - protein, 6 aa, Artificial Sequence
  West Nile virus
MDKLAL

SEQ ID NO: 777 - protein, 496 aa, Artificial Sequence
  Tick-borne encephalitis
SRCTHLENRDFVTGTQGTTRVTLVLELGGCVTITAEGKPSMDVWLDSIYQENPAKTREYCLHAKLSDTKVAARCPTMGPATLTEEHQSGTVCKRDQSDRGWGNHCGLFGKGSIVTCVKVACEAKKKAIGHVYDANKIVYTVKVEPHTGDYVAANETHSGRKTASFTVSSEKTILTMGDYGDVPLLCRVASGVDLAQTVILELDKTLEHLPTAWQVHRDWFNDLALPWKHEGAQQWNNAERLVEFGAPHAVKMDVYNLGDQTGVLLKSLAGVPVAHIDGTKYHLKSGHVTCEVGLEKLKMKGLTYTMCDKTKFAWKRTPTDSGHDTVVMEVTFSGTKPCRIPVRAVAHGSPDVNVAMLITPNPTIENNGGGFIEMQLPPGDNIIYVGELSHQWFQKGSSIGRVFQKTRKGIERLTVIGEHAWDFGSTGGFLTSVGKALHTVLGGAFNSIFGGVGFLPKLLLGVALAWLGLNMRNPTMSMSFLLAGGLVLAMTLGVGA

SEQ ID NO: 778 - DNA, 1488 bp, Artificial Sequence
  Tick-borne encephalitis
tcgcggtgcacacatttggagaacagggactttgtcactggtactcagggaaccacgagagtgactctggtgttggagctggggggatgtgtcacgatcactgctgaggggaagccctcaatggatgtgtggctcgattccatctatcaggagaaccctgccaagacacgcgagtactgtctgcatgccaagctgtcggacaccaaagttgcggccagatgcccaacaatggggcctgccactctgactgaggagcatcagagtggtacggtgtgcaagagagaccagagtgaccgaggctggggcaatcactgcggattgtttggaaagggcagtattgtgacctgtgtcaaggtggcttgtgaggcaaagaagaaggccattggacatgtgtatgatgccaacaagatcgtgtacaccgttaaggttgagccacacacgggggactatgttgccgccaatgaaacccacagtgggaggaagacggcatccttcacggtctcctcagaaaagaccatcttgactatgggggactatggagatgtgcccttgttgtgcagagtcgccagtggcgttgacttggctcagactgtcattcttgagcttgacaagactctggaacaccttccaacagcctggcaggtccatcgtgactggttcaatgatctggctctaccgtggaaacacgaaggagcgcaacaatggaacaatgctgagcgactggttgaatttggagctccgcatgccgttaaaatggacgtgtataaccttggagatcaaactggggtgttgttgaagtcacttgctggggttcctgtggcgcacattgatggaacaaagtaccacctaaaaagcggccatgtaacatgcgaggttggactagaaaagctcaaaatgaagggtctcacatacacaatgtgtgacaaaacgaagttcgcatggaagcggactccaacagacagcggacatgacacagtggtcatggaggtcacgttctctggaacaaaaccttgcaggatcccagtgcgggcagtggcacacggctctccagatgtaaatgtggccatgctgataacaccaaaccccaccattgagaacaatggaggtggcttcatagagatgcagctacccccaggggataacatcatctatgttggggaactaagccatcagtggttccagaaggggagcagcatcggaagggtgtttcaaaagaccaggaagggcatcgagagactgacagtgataggagaacacgcctgggacttcggttccactggaggtttcttgacttcggtaggcaaagcgctgcacacagtcctcggcggagccttcaacagcatctttgggggagtggggtttctgcccaagctcctgttgggtgtggccttagcctggttgggcctgaacatgaggaaccccaccatgtccatgagtttcctcttggctgggggactggtcctggctatgacacttggagtgggtgct

SEQ ID NO: 779 - protein, 110 aa, Artificial Sequence
  Domain III of West Nile virus
LKGTTYGVCSKAFKFLGTPADTGHGTVVLELQYTGTDGPCKVPISSVASLNDLTPVGRLVTVNPFVSVATANAKVLIELEPPFGDSYIVVGRGEQQINHHWHKSGSSIGK

SEQ ID NO: 780 - protein, 110 aa, Artificial Sequence
  Domain III of Japanese encephalitis virus
KGTTYGMCTEKFSFAKNPVDTGHGTVVIELSYSGSDGPCKIPIVSVASLNDMTPVGRLVTVNPFVATSSANSKVLVEMEPPFGDSYIVVGRGDKQINHHWHKAGSTLGKA

SEQ ID NO: 781 - DNA, 345 bp, Artificial Sequence; identical to SEQ ID NO: 614
  West Nile EIII+

SEQ ID NO: 782 - protein, 23 aa, Artificial Sequence
  P. aeruginosa
MNNVLKFSALALAAVLATGCSSH

SEQ ID NO: 783 - DNA, 72 bp, Artificial Sequence
  P. aeruginosa
atgaaagctactaaactggtactgggcgcggtaatcctgggttctactctgctggcaggttgctccagcaac

SEQ ID NO: 784 - protein, 24 aa, Artificial Sequence
  E. coli
MKATKLVLGAVILGSTLLAGCSSN

SEQ ID NO: 785 - DNA, 72 bp, Artificial Sequence; identical to SEQ ID NO: 783
  E. coli

SEQ ID NO: 786 - protein, 11 aa, Artificial Sequence
  Linker
HGAPVDPASPW

SEQ ID NO: 787 - protein, 585 aa, B/Victoria/2/87 HA
MKAIIVLLMVVTSNADRICTGITSSNSPHVVKTATQGEVNVTGVIPLTTTPTKSHFANLKGTKTRGKLCPKCLNCTDLDVALGRPKCTGTIPSAKASILHEVKPVTSGCFPIMHDRTKIRQLPNLLRGYEHIRLSTHNVINAETAPGGPYKVGTSGSCPNVTNGNGFFATMAWAVPKNDNNKTATNPLTVEVPYICTEGEDQITVWGFHSDNEAQMVKLYGDSKPQKFTSSANGVTTHYVSQIGGFPNQAEDGGLPQSGRIVVDYMVQKSGKTGTITYQRGILLPQKVWCASGRSKVIKGSLPLIGEADCLHEKYGGLNKSKPYYTGEHAKAIGNCPIWVKTPLKLANGTKYRPPAKLLKEKGFFGAIAGFLEGGWEGMIAGWHGYTSHGAHGVAVAADLKSTQEAINKITKNLNSLSELEVKNLQRLSGAMDELHNKILELDEKVDDLRADTISSQIELAVLLSNEGIINSEDEHLLALERKLKKMLGPSAVEIGNGCFETKHKCNQTCLDRIAAGTFNAGEFSLPTFDSLNITAASLNDDGLDNHTILLYYSTAASSLAVTLMIAIFIVYMVSRDNVSCSICL

SEQ ID NO: 788 - protein, 535 aa, Artificial Sequence
  Cross-reactive mutant (CRM) of diphtheria toxin including, CRM197
GADDVVDSSKSFVMENFSSYHGTKPGYVDSIQKGIQKPKSGTQGNYDDDWKGFYSTDNKYDAAGYSVDNENPLSGKAGGVVKVTYPGLTKVLALKVDNAETIKKELGLSLTEPLMEQVGTEEFIKRFGDGASRVVLSLPFAEGSSSVEYINNWEQAKALSVELEINFETRGKRGQDAMYEYMAQACAGNRVRRSVGSSLSCINLDWDVIRDKTKTKIESLKEHGPIKNKMSESPNKTVSEEKAKQYLEEFHQTALEHPELSELKTVTGTNPVFAGANYAAWAVNVAQVIDSETADNLEKTTAALSILPGIGSVMGIADGAVHHNTEEIVAQSIALSSLMVAQAIPLVGELVDIGFAAYNFVESIINLFQVVHNSYNRPAYSPGHKTQPFLHDGYAVSWNTVEDSIIRTGFQGESGHDIKITAENTPLPIAGVLLPTIPGKLDVNKSKTHISVNGRKIRMRCRAIDGDVTFCRPKSPVYVGNGVHANLHVAFHRSSSEKIHSNEISSDSIGVLGYQKTVDHTKVNSKLSLFFEIKS

SEQ ID NO: 789 - protein, 164 aa, Artificial Sequence
  Coat protein of Tobacco mosaic virus (TMV)
MMAYSIPTPSQLVYFTENYADYIPFVNRLINARSNSFQTQSGRDELREILIKSQVSVVSPISRFPAEPAYYIYLRDPSISTVYTALLQSTDTRNRVIEVENSTNVTTAEQLNAVRRTDDASTAIHNNLEQLLSLLTNGTGVFNRTSFESASGLTWLVTTTPRTA

SEQ ID NO: 790 - protein, 221 aa, Artificial Sequence
  Coat protein of alfalfa mosaic virus (AMV)
MSSSQKKAGGKAGKPTKRSQNYAALRKAQLPKPPALKVPVAKPTNTILPQTGCVWQSLGTPLSLSSSNGLGARFLYSFLKDFAAPRILEEDLIFRMVFSITPSHAGSFCLTDDVTTEDGRAVAHGNPMQEFPHGAFHANEKFGFELVFTAPTHAGMQNQNFKHSYAVALCLDFDALPEGSRNPSYRFNEVWVERKAFPRAGPLRSLITVGLFDDADDLDRQ

SEQ ID NO: 791 - protein, 237 aa, Artificial Sequence
  Coat protein of Potato virus X
MTTPANTTQATGSTTSTTTKTAGATPATTSGLFTIPDGEFFSTARAIVASNAVATNEDLSKIEAIWKDMKVPTDTMAQAAWDLVRHCADVGSSAQTEMIDTGPYSNGISRARLAAAIKEVCTLRQFCMKYAPVVWNWMLTNNSPPANWQAQGFKPEHKFAAFDFFNGVTNPAAIMPKEGLIRPPSEAEMNAAQTAAFVKITKARAQSNDFASLDAAVTRGRITGTTTAEAVVTLPPP

SEQ ID NO: 792 - protein, 395 aa, Artificial Sequence
  class I outer membrane protein of Neisseria meningitidis
MRKKLTALVLSALPLAAVADVSLYGEIKAGVEGRNYQLQLTEAQAANGGASGQVKVTKVTKAKSRIRTKISDFGSFIGFKGSEDLGEGLKAVWQLEQDVSVAGGGATQWGNRESFIGLAGEFGTLRAGRVANQFDDASQAIDPWDSNNDVASQLGIFKRHDDMPVSVRYDSPEFSGFSGSVQFVPAQNSKSAYKPAYWTTVNTGSATTTTFVPAVVGKPGSDVYYAGLNYKNGGFAGNYAFKYARHANVGRDAFELFLLGSGSDQAKGTDPLKNHQVHRLTGGYEEGGLNLALAAQLDLSENGDKTKNSTTEIAATASYRFGNAVPRISYAHGFDFIERGKKGENTSYDQIIAGVDYDFSKRTSAIVSGAWLKRNTGIGNYTQINAASVGLRHKF

SEQ ID NO: 793 - protein, 347 aa, Artificial Sequence
  Major fimbrial subunit protein type I (Fimbrillin)
MVLKTSNSNRAFGVGDDESKVAKLTVMVYNGEQQEAIKSAENATKVEDIKCSAGQRTLVVMANTGAMELVGKTLAEVKALTTELTAENQEAAGLIMTAEPKTIVLKAGKNYIGYSGTGEGNHIENDPLKIKRVHARMAFTEIKVQMSAAYDNIYTFVPEKIYGLIAKKQSNLFGATLVNADANYLTGSLTTFNGAYTPANYANVPWLSRNYVAPAADAPQGFYVLENDYSANGGTIHPTILCVYGKLQKNGADLAGADLAAAQAANWVDAEGKTYYPVLVNFNSNNYTYDSNYTPKNKIERNHKYDIKLTITGPGTNNPENPITESAHLNVQCTVAEWVLVGQNATW

SEQ ID NO: 794 - protein, 428 aa, Artificial Sequence
  Mycoplasma fermentans macrophage activating lipopeptide (MALP-2)
MKKSKKILLGLSPIAAVLPAVAVSCGNNDESNISFKEKDISKYTTTNANGKQVVKNAELLKLKPVLITDEGKIDDKSFNQSAFEALKAINKQTGIEINSVEPSSNFESAYNSALSAGHKIWVLNGFKHQQSIKQYIDAHREELERNQIKIIGIDFDIETEYKWFYSLQFNIKESAFTTGYAIASWLSEQDESKRVVASFGVGAFPGVTTFNEGFAKGILYYNQKHKSSKIYHTSPVKLDSGFTAGEKMNTVINNVLSSTPADVKYNPHVILSVAGPATFETVRLANKGQYVIGVDSDQGMIQDKDRILTSVLKHIKQAVYETLLDLILEKEEGYKPYVVKDKKADKKWSHFGTQKEKWIGVAENHFSNTEEQAKINNKIKEAIKMFKELPEDFVKYINSDKALKDGNKIDNVSERLEAIISAINKAAK

SEQ ID NO: 795 - protein, 143 aa, Artificial Sequence
  p19 protein of Mycobacterium tuberculosis
ATTLPVQRHPRSLFPEFSELFAAFPSFAGLRPTFDTRLMRLEDEMKEGRYEVRAELPGVDPDKDVDIMVRDGQLTIKAERTEQKDFDGRSEFAYGSFVRTVSLPVGADEDDIKATYDKGILTVSVAVSEGKPTEKHIQIRSTN

SEQ ID NO: 796 - protein, 19 aa, Artificial Sequence
  muturational cleavage site
NVPEKQTRGIFGAIAGFIE

SEQ ID NO: 797 - protein, 19 aa, Artificial Sequence
  muturational cleavage site
NIPSIQSRGLFGAIAGFIE

SEQ ID NO: 798 - protein, 19 aa, Artificial Sequence
  muturational cleavage site
PAKLLKERGFFGAIAGFLE

SEQ ID NO: 799 - protein, 19 aa, Artificial Sequence
  muturational cleavage site
RERRRKKRGLFGAIAGFIE

SEQ ID NO: 800 - protein, 19 aa, Artificial Sequence
  muturational cleavage site
NVPEKQTRGIFGAIAGFIE

SEQ ID NO: 801 - protein, 19 aa, Artificial Sequence
  muturational cleavage site
NVPQIESRGLFGAIAGFIE

SEQ ID NO: 802 - protein, 19 aa, Artificial Sequence
  muturational cleavage site
NIPSIQSRGLFGAIAGFIE

SEQ ID NO: 803 - protein, 12 aa, Artificial Sequence
  muturational cleavage site
RGLFGAIAGFIE

SEQ ID NO: 804 - protein, 19 aa, Artificial Sequence
  muturational cleavage site
PAKLLKERGFFGAIAGFLE

SEQ ID NO: 805 - protein, 12 aa, Artificial Sequence
  muturational cleavage site
RGFFGAIAGFLE

SEQ ID NO: 806 - protein, 24 aa, Artificial Sequence
  muturational cleavage site
SLLTEVETPIRNEWGSRSNDSSDP

SEQ ID NO: 807 - protein, 29 aa, Artificial Sequence
  muturational cleavage site
GSGAGSLLTEVETPTRNEWECRCSDSSDP

SEQ ID NO: 808 - protein, 29 aa, Artificial Sequence
  muturational cleavage site
GSGAGSLLTEVETLTRNGWGCRCSDSSDP

SEQ ID NO: 809 - protein, 20 aa, Artificial Sequence
  muturational cleavage site
LTSGHLKCRVKMEKLQLKGT

SEQ ID NO: 810 - protein, 27 aa, Artificial Sequence
  muturational cleavage site
EAEPPFGDSYIIIGVEPGQLKLNWFKK

SEQ ID NO: 811 - protein, 24 aa, Artificial Sequence
  muturational cleavage site
SLLTEVETPIRNEWGSRSNDSSDP

SEQ ID NO: 812 - protein, 494 aa, S. typhimurium flagellin (P06179)
AQVINTNSLSLLTQNNLNKSQSALGTAIERLSSGLRINSAKDDAAGQAIANRFTANIKGLTQASRNANDGISIAQTTEGALNEINNNLQRVRELAVQSANSTNSQSDLDSIQAEITQRLNEIDRVSGQTQFNGVKVLAQDNTLTIQVGANDGETIDIDLKQINSQTLGLDTLNVQQKYKVSDTAATVTGYADTTIALDNSTFKASATGLGGTDQKIDGDLKFDDTTGKYYAKVTVTGGTGKDGYYEVSVDKTNGEVTLAGGATSPLTGGLPATATEDVKNVQVANADLTEAKAALTAAGVTGTASVVKMSYTDNNGKTIDGGLAVKVGDDYYSATQNKDGSISINTTKYTADDGTSKTALNKLGGADGKTEVVSIGGKTYAASKAEGHNFKAQPDLAEAAATTTENPLQKIDAALAQVDTLRSDLGAVQNRFNSAITNLGNTVNNLTSARSRIEDSDYATEVSNMSRAQILQQAGTSVLAQANQVPQNVLSLLR

SEQ ID NO: 813 - protein, 504 aa, Salmonella muenchen flagellin (P06177)
AQVINTNSLSLLTQNNLNKSQSALGTAIERLSSGLRINSAKDDAAGQAIANRFTANIKGLTQASRNANDGISIAQTTEGALNEINNNLQRVRELAVQSANGTNSQSDLDSIQAEITQRLNEIDRVSGQTQFNGVKVLAQDNTLTIQVGANDGETIDIDLKEISSKTLGLDKLNVQDAYTPKETAVTVDKTTYKNGTDTITAQSNTDIQTAIGGGATGVTGADIKFKDGQYYLDVKGGASAGVYKATYDETTKKVNIDTTDKTPLATAEATAIRGTATITHNQIAEVTKEGVDTTTVAAQLAAAGVTGADKDNTSLVKLSFEDKNGKVIDGGYAVKMGDDFYAATYDEKQVQLLLNNHYTDGAGVLQTGAVKFGGANGKSEVVTATVGKTYLASDLDKHNFRTGGELKEVNTDKTENPLQKIDAALAQVDTLRSDLGAVQNRFNSAITNLGNTVNNLSSARSRIEDSDYATEVSNMSRAQILQQAGTSVLAQANQVPQNVLSLLR

SEQ ID NO: 814 - protein, 497 aa, E. coli flagellin (P04949)
AQVINTNSLSLITQNNINKNQSALSSSIERLSSGLRINSAKDDAAGQAIANRFTSNIKGLTQAARNANDGISVAQTTEGALSEINNNLQRVRELTVQATTGTNSESDLSSIQDEIKSRLDEIDRVSGQTQFNGVNVLAKNGSMKIQVGANDNQTITIDLKQIDAKTLGLDGFSVKNNDTVTTSAPVTAFGATTTNNIKLTGITLSTEAATDTGGTNPASIEGVYTDNGNDYYAKITGGDNDGKYYAVTVANDGTVTMATGATANATVTDANTTKATTITSGGTPVQIDNTAGSATANLGAVSLVKLQDSKGNDTDTYALKDTNGNLYAADVNETTGAVSVKTITYTDSSGAASSPTAVKLGGDDGKTEVVDIDGKTYDSADLNGGNLQTGLTAGGEALTAVANGKTTDPLKALDDAIASVDKFRSSLGAVQNRLDSAVTNLNNTTTNLSEAQSRIQDADYATEVSNMSKAQIIQQAGNSVLAKANQVPQQVLSLLQG

SEQ ID NO: 815 - protein, 393 aa, pseudomonas aerugienosa
ALTVNTNIASLNTQRNLNNSSASLNTSLQRLSTGSRINSAKDDAAGLQIANRLTSQVNGLNVATKNANDGISLAQTAEGALQQSTNILQRMRDLSLQSANGSNSDSERTALNGEVKQLQKELDRISNTTTFGGRKLLDGSFGVASFQVGSAANEIISVGIDEMSAESLNGTYFKADGGGAVTAATASGTVDIAIGITGGSAVNVKVDMKGNETAEQAAAKIAAAVNDANVGIGAFSDGDTISYVSKAGKDGSGAITSAVSGVVIADTGSTGVGTAAGVTPSATAFAKTNDTVAKIDISTAKGAQSAVLVIDEAIKQIDAQRADLGAVQNRFDNTINNLKNIGENVSAARGRIEDTDFAAETANLTKNQVLQQAGTAILAQANQLPQSVLSLLR

SEQ ID NO: 816 - protein, 506 aa, Artificial Sequence; identical to SEQ ID NO: 312
  STF2

SEQ ID NO: 817 - DNA, 345 bp, Artificial Sequence; identical to SEQ ID NO: 614
  EIII+

SEQ ID NO: 818 - protein, 116 aa, Artificial Sequence; identical to SEQ ID NO: 682
  JEIII+

SEQ ID NO: 819 - DNA, 348 bp, Artificial Sequence; identical to SEQ ID NO: 681
  JEIII+

SEQ ID NO: 820 - protein, 287 aa, Listeria monocytogenes
MKVNTNIISLKTQEYLRKNNEGMTQAQERLASGKRINSSLDDAAGLAVVTRMNVKSTGLDAASKNSSMGIDLLQTADSALSSMSSILQRMRQLAVQSSNGSFSDEDRKQYTAEFGSLIKELDHVADTTNYNNIKLLDQTATNAATQVSIQASDKANDLINIDLFNAKGLSAGTITLGSGSTVAGYSALSVADADSSQEATEAIDELINNISNGRALLGAGMSRLSYNVSNVNNQSIATKASASSIEDADMAAEMSEMTKYKILTQTSISMLSQANQTPQMLTQLINS

SEQ ID NO: 821 - protein, 12 aa, Artificial Sequence
  muturational cleavage site
  VARIANT 4: Xaa = Any Amino Acid
RGLXGAIAGFIE

SEQ ID NO: 822 - protein, 12 aa, Artificial Sequence
  muturational cleavage site
  VARIANT 4: Xaa = Any Amino Acid
RGLXGAIAGFIE

SEQ ID NO: 823 - protein, 4 aa, Artificial Sequence
  flagellin peptide
TIAL

SEQ ID NO: 824 - protein, 4 aa, Artificial Sequence
  flagellin peptide
TTLD

SEQ ID NO: 825 - protein, 7 aa, Artificial Sequence
  flagellin peptide
GTDQKID

SEQ ID NO: 826 - protein, 6 aa, Artificial Sequence
  flagellin peptide
NGEVTL

SEQ ID NO: 827 - protein, 12 aa, Artificial Sequence
  muturational cleavage site
SGLDDAAIKAAT

SEQ ID NO: 828 - protein, 12 aa, Artificial Sequence
  muturational cleavage site
RGIFGAIAGFIE

SEQ ID NO: 829 - protein, 5 aa, Artificial Sequence
  flagellin peptides
GADAA

SEQ ID NO: 830 - protein, 4 aa, Artificial Sequence
  flagellin peptides
AGGA

SEQ ID NO: 831 - protein, 4 aa, Artificial Sequence
  flagellin peptides
PATA

SEQ ID NO: 832 - protein, 4 aa, Artificial Sequence
  flagellin peptides
AAGA

SEQ ID NO: 833 - protein, 4 aa, Artificial Sequence
  flagellin peptides
ATTK

SEQ ID NO: 834 - protein, 12 aa, Artificial Sequence
  flagellin peptides
AGATKTTMPAGA

SEQ ID NO: 835 - protein, 5 aa, Artificial Sequence
  flagellin peptides
VTGTG

SEQ ID NO: 836 - protein, 10 aa, Artificial Sequence
  flagellin peptides
TEAKAALTAA

SEQ ID NO: 837 - protein, 11 aa, Artificial Sequence
  flagellin peptides
ASVVKMSYTDN

SEQ ID NO: 838 - protein, 9 aa, Artificial Sequence
  flagellin peptides
VDATDANGA

SEQ ID NO: 839 - protein, 19 aa, Artificial Sequence
  muturational cleavage site
RERRRKKRGLFGAIAGFIE

SEQ ID NO: 840 - protein, 494 aa, Artificial Sequence
  flagellin 1UCU
AQVINTNSLSLLTQNNLNKSQSALGTAIERLSSGLRINSAKDDAAGQAIANRFTANIKGLTQASRNANDGISIAQTTEGALNEINNNLQRVRELAVQSANSTNSQSDLDSIQAEITQRLNEIDRVSGQTQFNGVKVLAQDNTLTIQVGANDGETIDIDLKQINSQTLGLDTLNVQQKYKVSDTAATVTGYADTTIALDNSTFKASATGLGGTDQKIDGDLKFDDTTGKYYAKVTVTGGTGKDGYYEVSVDKTNGEVTLAGGATSPLTGGLPATATEDVKNVQVANADLTEAKAALTAAGVTGTASVVKMSYTDNNGKTIDGGLAVKVGDDYYSATQNKDGSISINTTKYTADDGTSKTALNKLGGADGKTEVVSIGGKTYAASKAEGHNFKAQPDLAEAAATTTENPLQKIDAALAQVDTLRSDLGAVQNRFNSAITNLGNTVNNLTSVRSRIEDSDYATEVSNMSRAQILQQAGTSVLAQANQVPQNVLSLLR

SEQ ID NO: 841 - protein, 505 aa, Artificial Sequence
  flagellin Sf1a
AQVINTNSLSLLTQNNLNKSQSALGTAIERLSSGLRINSAKDDAAGQAIANRFTANIKGLTQASRNANDGISIAQTTEGALNEINNNLQRVRELAVQSANSTNSQSDLDSIQAEITQRLNEIDRVSGQTQFNGVKVLAQDNTLTIQVGANDGETIDIDLKQINSQTLGLDSLNVQKAYDVKDTAVTTKAYANNGTTLDVSGLDDAAIKAATGGTNGTASVTGGAVKFDADNNKYFVTIGGFTGADAAKNGDYEVNVATDGTVTLAAGATKTTMPAGATTKTEVQELKDTPAVVSADAKNALIAGGVDATDANGAELVKMSYTDKNGKTIEGGYALKAGDKYYAADYDEATGAIKAKTTSYTAADGTTKTAANQLGGVDGKTEVVTIDGKTYNASKAAGHDFKAQPELAEAAAKTTENPLQKIDAALAQVDALRSDLGAVQNRFNSAITNLGNTVNNLSEARSRIEDSDYATEVSNMSRAQILQQAGTSVLAQANQVPQNVLSLLR
